(19) United States
(12) Patent Application Publication
(10) Pub. No.: US 2003/0108907 A1
(43) Pub. Date: Jun. 12, 2003

(54) Nucleic acids, proteins, and antibodies

(75) Inventors: Craig A. Rosen, Laytonsville, MD (US); Steven M. Ruben, Olney, MD (US); Steven C. Barash, Rockville, MD (US)

Correspondence Address: HUMAN GENOME SCIENCES INC, 9410 KEY WEST AVENUE, ROCKVILLE, MD, 20850

(73) Assignee: Human Genome Sciences, Inc., Rockville, MD (US)

(21) Appl. No.: 10/205,428

(22) Filed: Jul. 26, 2002

Related U.S. Application Data
(63) Continuation of application No. 09/764,892, filed on Jan. 17, 2001.
(60) Provisional application No. 60/179,065, filed on Jan. 31, 2000.
(60) Provisional application No. 60/180,628, filed on Feb. 4, 2000.
(60) Provisional application No. 60/214,886, filed on Jun. 28, 2000.
(60) Provisional application No. 60/217,487, filed on Jul. 11, 2000.
(60) Provisional application No. 60/225,758, filed on Aug. 14, 2000.
(60) Provisional application No. 60/220,963, filed on Jul. 26, 2000.
(60) Provisional application No. 60/217,496, filed on Jul. 11, 2000.
(60) Provisional application No. 60/225,447, filed on Aug. 14, 2000.
(60) Provisional application No. 60/218,290, filed on Jul. 14, 2000.
(60) Provisional application No. 60/225,757, filed on Aug. 14, 2000.
(60) Provisional application No. 60/226,868, filed on Aug. 22, 2000.
(60) Provisional application No. 60/216,647, filed on Jul. 7, 2000.
(60) Provisional application No. 60/225,267, filed on Aug. 14, 2000.
(60) Provisional application No. 60/216,880, filed on Jul. 7, 2000.
(60) Provisional application No. 60/225,270, filed on Aug. 14, 2000.
(60) Provisional application No. 60/251,869, filed on Dec. 8, 2000.
(60) Provisional application No. 60/235,834, filed on Sep. 27, 2000.
(60) Provisional application No. 60/234,274, filed on Sep. 21, 2000.
(60) Provisional application No. 60/234,223, filed on Sep. 21, 2000.
(60) Provisional application No. 60/228,924, filed on Aug. 30, 2000.
(60) Provisional application No. 60/224,518, filed on Aug. 14, 2000.
(60) Provisional application No. 60/236,369, filed on Sep. 29, 2000.
(60) Provisional application No. 60/224,519, filed on Aug. 14, 2000.
(60) Provisional application No. 60/220,964, filed on Jul. 26, 2000.
(60) Provisional application No. 60/241,809, filed on Oct. 20, 2000.
(60) Provisional application No. 60/249,299, filed on Nov. 17, 2000.
(60) Provisional application No. 60/236,327, filed on Sep. 29, 2000.
(60) Provisional application No. 60/241,785, filed on Oct. 20, 2000.
(60) Provisional application No. 60/244,617, filed on Nov. 1, 2000.
(60) Provisional application No. 60/225,268, filed on Aug. 14, 2000.
(60) Provisional application No. 60/236,368, filed on Sep. 29, 2000.
(60) Provisional application No. 60/251,856, filed on Dec. 8, 2000.
(60) Provisional application No. 60/251,868, filed on Dec. 8, 2000.
(60) Provisional application No. 60/229,344, filed on Sep. 1, 2000.
(60) Provisional application No. 60/234,997, filed on Sep. 25, 2000.
(60) Provisional application No. 60/229,343, filed on Sep. 1, 2000.
(60) Provisional application No. 60/229,345, filed on Sep. 1, 2000.
(60) Provisional application No. 60/229,287, filed on Sep. 1, 2000.
(60) Provisional application No. 60/229,513, filed on Sep. 5, 2000.
(60) Provisional application No. 60/231,413, filed on Sep. 8, 2000.
(60) Provisional application No. 60/229,509, filed on Sep. 5, 2000.
(60) Provisional application No. 60/236,367, filed on Sep. 29, 2000.
(60) Provisional application No. 60/237,039, filed on Oct. 2, 2000.
(60) Provisional application No. 60/237,038, filed on Oct. 2, 2000.
(60) Provisional application No. 60/236,370, filed on Sep. 29, 2000.
(60) Provisional application No. 60/236,802, filed on Oct. 2, 2000.
(60) Provisional application No. 60/237,037, filed on Oct. 2, 2000.
(60) Provisional application No. 60/237,040, filed on Oct. 2, 2000.
(60) Provisional application No. 60/240,960, filed on Oct. 20, 2000.
(60) Provisional application No. 60/239,935, filed on Oct. 13, 2000.
(60) Provisional application No. 60/239,937, filed on Oct. 13, 2000.
(60) Provisional application No. 60/241,787, filed on Oct. 20, 2000.
(60) Provisional application No. 60/246,474, filed on Nov. 8, 2000.
(60) Provisional application No. 60/246,532, filed on Nov. 8, 2000.
(60) Provisional application No. 60/249,216, filed on Nov. 17, 2000.
(60) Provisional application No. 60/249,210, filed on Nov. 17, 2000.
(60) Provisional application No. 60/226,681, filed on Aug. 22, 2000.
(60) Provisional application No. 60/225,759, filed on Aug. 14, 2000.
(60) Provisional application No. 60/225,213, filed on Aug. 14, 2000.
(60) Provisional application No. 60/227,182, filed on Aug. 22, 2000.
(60) Provisional application No. 60/225,214, filed on Aug. 14, 2000.
(60) Provisional application No. 60/235,836, filed on Sep. 27, 2000.
(60) Provisional application No. 60/230,438, filed on Sep. 6, 2000.
(60) Provisional application No. 60/215,135, filed on Jun. 30, 2000.
(60) Provisional application No. 60/225,266, filed on Aug. 14, 2000.
(60) Provisional application No. 60/249,218, filed on Nov. 17, 2000.
(60) Provisional application No. 60/249,208, filed on Nov. 17, 2000.
(60) Provisional application No. 60/249,213, filed on Nov. 17, 2000.
(60) Provisional application No. 60/249,212, filed on Nov. 17, 2000.
(60) Provisional application No. 60/249,207, filed on Nov. 17, 2000.
(60) Provisional application No. 60/249,245, filed on Nov. 17, 2000.
(60) Provisional application No. 60/249,244, filed on Nov. 17, 2000.
(60) Provisional application No. 60/249,217, filed on Nov. 17, 2000.
(60) Provisional application No. 60/249,211, filed on Nov. 17, 2000.
(60) Provisional application No. 60/249,215, filed on Nov. 17, 2000.
(60) Provisional application No. 60/249,264, filed on Nov. 17, 2000.
(60) Provisional application No. 60/249,214, filed on Nov. 17, 2000.
(60) Provisional application No. 60/249,297, filed on Nov. 17, 2000.
(60) Provisional application No. 60/232,400, filed on Sep. 14, 2000.
(60) Provisional application No. 60/231,242, filed on Sep. 8, 2000.
(60) Provisional application No. 60/232,081, filed on Sep. 8, 2000.
(60) Provisional application No. 60/232,080, filed on Sep. 8, 2000.
(60) Provisional application No. 60/231,414, filed on Sep. 8, 2000.
(60) Provisional application No. 60/231,244, filed on Sep. 8, 2000.
(60) Provisional application No. 60/233,064, filed on Sep. 14, 2000.
(60) Provisional application No. 60/233,063, filed on Sep. 14, 2000.
(60) Provisional application No. 60/232,397, filed on Sep. 14, 2000.
(60) Provisional application No. 60/232,399, filed on Sep. 14, 2000.
(60) Provisional application No. 60/232,401, filed on Sep. 14, 2000.
(60) Provisional application No. 60/241,808, filed on Oct. 20, 2000.
(60) Provisional application No. 60/241,826, filed on Oct. 20, 2000.
(60) Provisional application No. 60/241,786, filed on Oct. 20, 2000.
(60) Provisional application No. 60/241,221, filed on Oct. 20, 2000.
(60) Provisional application No. 60/246,475, filed on Nov. 8, 2000.
(60) Provisional application No. 60/231,243, filed on Sep. 8, 2000.
(60) Provisional application No. 60/233,065, filed on Sep. 14, 2000.
(60) Provisional application No. 60/232,398, filed on Sep. 14, 2000.
(60) Provisional application No. 60/234,998, filed on Sep. 25, 2000.
(60) Provisional application No. 60/246,477, filed on Nov. 8, 2000.
(60) Provisional application No. 60/246,528, filed on Nov. 8, 2000.
(60) Provisional application No. 60/246,525, filed on Nov. 8, 2000.
(60) Provisional application No. 60/246,476, filed on Nov. 8, 2000.
(60) Provisional application No. 60/246,526, filed on Nov. 8, 2000.
(60) Provisional application No. 60/249,209, filed on Nov. 17, 2000.
(60) Provisional application No. 60/246,527, filed on Nov. 8, 2000.
(60) Provisional application No. 60/246,523, filed on Nov. 8, 2000.
(60) Provisional application No. 60/246,524, filed on Nov. 8, 2000.
(60) Provisional application No. 60/246,478, filed on Nov. 8, 2000.
(60) Provisional application No. 60/246,609, filed on Nov. 8, 2000.
(60) Provisional application No. 60/246,613, filed on Nov. 8, 2000.
(60) Provisional application No. 60/249,300, filed on Nov. 17, 2000.
(60) Provisional application No. 60/249,265, filed on Nov. 17, 2000.
(60) Provisional application No. 60/246,610, filed on Nov. 8, 2000.
(60) Provisional application No. 60/246,611, filed on Nov. 8, 2000.
(60) Provisional application No. 60/230,437, filed on Sep. 6, 2000.
(60) Provisional application No. 60/251,990, filed on Dec. 8, 2000.
(60) Provisional application No. 60/251,988, filed on Dec. 5, 2000.
(60) Provisional application No. 60/251,030, filed on Dec. 5, 2000.
(60) Provisional application No. 60/251,479, filed on Dec. 6, 2000.
(60) Provisional application No. 60/256,719, filed on Dec. 5, 2000.
(60) Provisional application No. 60/250,160, filed on Dec. 1, 2000.
(60) Provisional application No. 60/251,989, filed on Dec. 8, 2000.
(60) Provisional application No. 60/250,391, filed on Dec. 1, 2000.
(60) Provisional application No. 60/254,097, filed on Dec. 11, 2000.
(60) Provisional application No. 60/231,968, filed on Sep. 12, 2000.
(60) Provisional application No. 60/226,279, filed on Aug. 18, 2000.
(60) Provisional application No. 60/186,350, filed on Mar. 2, 2000.
(60) Provisional application No. 60/184,664, filed on Feb. 24, 2000.
(60) Provisional application No. 60/189,874, filed on Mar. 16, 2000.
(60) Provisional application No. 60/198,123, filed on Apr. 18, 2000.
(60) Provisional application No. 60/227,009, filed on Aug. 23, 2000.
(60) Provisional application No. 60/235,484, filed on Sep. 26, 2000.
(60) Provisional application No. 60/190,076, filed on Mar. 17, 2000.
(60) Provisional application No. 60/209,467, filed on Jun. 7, 2000.
(60) Provisional application No. 60/205,515, filed on May 19, 2000.
(60) Provisional application No. 60/259,678, filed on Jan. 5, 2001.

(51) Int. Cl. C12Q 1/68; G01N 33/574; C07H 21/04; C12N 9/00; C12P 21/02; C12N 5/06

(52) U.S. Cl. 435/6; 435/7.23; 435/69.3; 435/183; 435/320.1; 435/325; 536/23.2

(57) ABSTRACT

The present invention relates to novel ovarian and/or breast cancer related polynucleotides and the polypeptides encoded by these polynucleotides herein collectively known as “ovarian and/or breast cancer antigens,” and the use of such ovarian and/or breast cancer antigens for detecting disorders of the ovaries and/or breast, particularly the presence of ovarian and/or breast cancer and ovarian and/or breast cancer metastases. More specifically, isolated ovarian and/or breast cancer associated nucleic acid molecules are provided encoding novel ovarian and/or breast cancer associated polypeptides. Novel ovarian and/or breast cancer polypeptides and antibodies that bind to these polypeptides are provided. Also provided are vectors, host cells, and recombinant and synthetic methods for producing human ovarian and/or breast cancer associated polynucleotides and/or polypeptides. The invention further relates to diagnostic and therapeutic methods useful for diagnosing, treating, preventing and/or prognosing disorders related to the ovaries and/or breast, including ovarian and/or breast cancer, and therapeutic methods for treating such disorders. The invention further relates to screening methods for identifying agonists and antagonists of polynucleotides and polypeptides of the invention. The present invention further relates to methods and/or compositions for inhibiting the production and function of the polypeptides of the present invention.

### STATEMENT UNDER 37 C.F.R. §1.77(b)(4)

[0001] This application refers to a “Sequence Listing” listed below, which is provided as an electronic document on two identical compact discs (CD-R), labeled “Copy 1” and “Copy 2.” These compact discs each contain the file “PA117C1_seqList.txt” (2,067,799 bytes, created on Jul. 15, 2002), which is hereby incorporated in its entirety herein.

[0002] The Sequence Listing may be viewed on an IBM-PC machine running the MS-Windows operating system.

### FIELD OF THE INVENTION

[0003] The present invention relates to novel ovarian and/or breast cancer related polynucleotides, the polypeptides encoded by these polynucleotides herein collectively referred to as “ovarian and/or breast cancer antigens,” and antibodies that immunospecifically bind these polypeptides, and the use of such ovarian and/or breast cancer polynucleotides, antigens, and antibodies for detecting, treating, preventing and/or prognosing disorders of the reproductive system, particularly ovarian and/or breast cancers, including, but not limited to, ovarian and/or breast neoplasms and ovarian and/or breast cancer metastases. More specifically, isolated ovarian and/or breast cancer nucleic acid molecules are provided encoding novel ovarian and/or breast cancer polypeptides. Novel ovarian and/or breast cancer polypeptides and antibodies that bind to these polypeptides are provided. Also provided are vectors, host cells, and recombinant and synthetic methods for producing human ovarian and/or breast cancer polynucleotides, polypeptides, and/or antibodies. The invention further relates to diagnostic and therapeutic methods useful for diagnosing, treating, preventing and/or prognosing disorders related to ovarian and/or breast cancer and therapeutic methods for treating such disorders. The invention further relates to screening methods for identifying agonists and antagonists of polynucleotides and polypeptides of the invention. The invention further relates to methods and/or compositions for inhibiting or promoting the production and/or function of the polypeptides of the invention.

### BACKGROUND OF THE INVENTION

[0004] Breast and ovarian cancers rank among the leading causes of cancer and cancer-related deaths among women in the United States. More than 200,000 new cases of breast or ovarian cancer are diagnosed annually, and a woman's lifetime risk of breast cancer is 1 in 8. Although most breast and ovarian cancers are sporadic, the familial nature and genetic contribution to disease development can be significant. About one in five women with breast or ovarian cancer has a family history of the disease and between 5% and 10% of cases are believed to reflect heritable breast and/or ovarian cancer. Among unaffected, gravid women aged 35 years or older, 7% to 8% have been found to have at least one family member with breast or ovarian cancer.

[0005] In light of the significant genetic contribution to the risk of breast and ovarian cancer, advances in genetics are considered the key to developing better and safer therapies, as well as improving diagnosis and prevention.

[0006] Ovarian Cancer

[0007] The ovaries are a pair of organs in the female reproductive system. They are located in the pelvis, one on each side of the uterus (the hollow, pear-shaped organ where a baby grows). Each ovary is about the size and shape of an almond. The ovaries have two functions: they produce eggs and female hormones (chemicals that control the way certain cells or organs function). Every month, during the menstrual cycle, an egg is released from one ovary in a process called ovulation. The egg travels from the ovary through the fallopian tube to the uterus where it may be fertilized or expelled. The ovaries are also the main source of the female hormones estrogen and progesterone. These hormones influence the development of a woman's breasts, body shape, and body hair. They also regulate the menstrual cycle and pregnancy.

[0008] Among women in the United States, cancer of the ovary ranks fifth in incidence. There are no proven methods of prevention and it often is a rapidly fatal disease. Ovarian cancer develops most often in women between the ages of 50 through 70, and while it is the third most common cancer of the female reproductive system, more women die of ovarian cancers than of any other.

[0009] The ovaries include a variety of cell types, each of which may give rise to a distinct type of cancer, including, but not limited to, ovarian epithelial cancer, ovarian germ cell tumors, ovarian papillary serous adenocarcinoma, ovarian mucinous adenocarcinoma, ovarian Krukenberg tumor, malignant mixed Mullerian tumors, and ovarian low malignant tumors. The exact causes of ovarian cancer are not known. However, studies show that the following factors may increase the chance of developing this disease: family history, age, childbearing, history of other cancers, use of fertility drugs, and honnone replacement therapy. The treatment consists of surgery, X-ray therapy, or chemotherapy. The prognosis is variable and depends on the type of tumour that is present as well as the extent of metastatic spread.

[0010] Breast Cancer

[0011] Each breast has 15 to 20 sections called lobes. Within each lobe are many smaller lobules. Lobules end in dozens of tiny bulbs that can produce milk. The lobes, lobules, and bulbs are all linked by thin tubes called ducts. These ducts lead to the nipple in the center of a dark area of skin called the areola. Fat surrounds the lobules and ducts. There are no muscles in the breast, but muscles lie under each breast and cover the ribs. Each breast also contains blood vessels and lymph vessels. The lymph vessels carry colorless fluid called lymph, and lead to small bean-shaped organs called lymph nodes. Clusters of lymph nodes are found near the breast in the axilla (under the arm), above the collarbone, and in the chest. Lymph nodes are also found in many other parts of the body.

[0012] Breast cancer is the most common cancer among women, other than skin cancer and is the second leading cause of cancer death in women, after lung cancer. Breast cancer also occurs among men, although much less often.

[0013] Years of extensive study of families with a high incidence of breast cancer resulted in the isolation of two genes, BRCA1 and BRCA2 each of which is thought to be responsible for 45% of heritable breast cancers. In addition to their association with breast cancer, both genes share several molecular features. Both genes produce very large proteins whose functions and cellular localization continue to be debated. As with many large genes, more than 85% of mutations are nonsense mutations (i.e., premature stop codons) that result in a truncated protein product. It is speculated that these genes may have a nuclear regulatory function or may be involved in DNA repair, but the physiologic role of these genes and theircorresponding mutations are yet to be established.

[0014] Known types of breast cancer include, for example, lobular carcinoma in situ, ductal carcinoma in situ (including Paget's disease), invasive ductal carcinoma, invasive lobular carcinoma, medullary carcinoma, colloid (mucinous) carcinoma, tubular carcinoma, invasive papillary carcinoma, fibroadenoma, pipillary carcinoma, secretory carcinoma, and apocrine carcinoma.

[0015] The discovery of new human ovarian and/or breast cancer associated polynucleotides, the polypeptides encoded by them, and antibodies that immunospecifically bind these polypeptides, satisfies a need in the art by providing new compositions which are useful in the diagnosis, treatment, prevention and/or prognosis of ovarian and/or breast cancer, including disorders associated with ovarian and/or breast cancer, including, but not limited to, cancers of the ovaries, such as primary and secondary cancerous growth, endometrioid carcinoma of the ovary, ovarian papillary serous adenocarcinoma, ovarian mucinous adenocarcinoma, and ovarian Krukenberg tumors; and cancers of the breast, such as in situ carcinomas (e.g., ductal carcinoma in situ, Paget's disease, and lobular carcinoma in situ), invasive carcinomas (e.g., invasive ductal carcinoma, invasive lobular carcinoma, medullary carcinoma, colloid (mucinous) carcinoma, tubular carcinoma, and invasive papillary carcinoma), and fibroadenoma, pipillary carcinoma, secretory carcinoma, and apocrine carcinoma; and/or as described under “Hyperproliferative Disorders” and “Reproductive System Disorders” below.

### SUMMARY OF THE INVENTION

[0016] The present invention relates to novel ovarian and/or breast cancer related polynucleotides, the polypeptides encoded by these polynucleotides herein collectively referred to as “ovarian and/or breast cancer antigens,” and antibodies that immunospecifically bind these polypeptides, and the use of such ovarian and/or breast cancer polynucleotides, antigens, and antibodies for detecting, treating, preventing and/or prognosing ovarian and/or breast cancer, including, but not limited to, the presence of ovarian and/or breast neoplasms and ovarian and/or breast cancer metastases. More specifically, isolated ovarian and/or breast cancer nucleic acid molecules are provided encoding novel ovarian and/or breast cancer polypeptides. Novel ovarian and/or breast cancer polypeptides and antibodies that bind to these polypeptides are provided. Also provided are vectors, host cells, and recombinant and synthetic methods for producing human ovarian and/or breast cancer polynucleotides, polypeptides, and/or antibodies. The invention further relates to diagnostic and therapeutic methods useful for diagnosing, treating, preventing and/or prognosing disorders related to ovarian and/or breast cancer and therapeutic methods for treating such disorders. The invention further relates to screening methods for identifying agonists and antagonists of polynucleotides and polypeptides of the invention. The invention further relates to methods and/or compositions for inhibiting or promoting the production and/or function of the polypeptides of the invention.

### DETAILED DESCRIPTION

[0017] Tables

[0018] Table 1A summarizes some of the polynucleotides encompassed by the invention (including cDNA clones related to the sequences (Clone ID NO:Z), contig sequences (contig identifier (Contig ID:) and contig nucleotide sequence identifier (SEQ ID NO:X)) and further summarizes certain characteristics of these polynucleotides and the polypeptides encoded thereby. The first column provides a unique clone identifier, “Clone ID NO:Z”, for a cDNA plasmid related to each ovarian and/or breast cancer associated contig sequence disclosed in Table 1A. The second column provides a unique contig identifier, “Contig ID:” for each of the contig sequences disclosed in Table 1A. The third column provides the sequence identifier, “SEQ ID NO:X”, for each of the contig polynucleotide sequences disclosed in Table 1A. The fourth column, “ORF (From-To)”, provides the location (i.e., nucleotide position numbers) within the polynucleotide sequence of SEQ ID NO:X that delineate the preferred open reading frame (ORF) shown in the sequence listing and referenced in Table 1A as SEQ ID NO:Y (column 5). Column 6 lists residues comprising predicted epitopes contained in the polypeptides encoded by each of the preferred ORFs (SEQ ID NO:Y). Identification of potential immunogenic regions was performed according to the method of Jameson and Wolf (CABIOS, 4:181-186 (1988)); specifically, the Genetics Computer Group (GCG) implementation of this algorithm, embodied in the program PEPTIDESTRUCTURE (Wisconsin Package v10.0, Genetics Computer Group (GCG), Madison, Wisc.). This method returns a measure of the probability that a given residue is found on the surface of the protein. Regions where the antigenic index score is greater than 0.9 over at least 6 amino acids are indicated in Table 1A as “Predicted Epitopes.” In particular embodiments, ovarian and/or breast cancer associated polypeptides of the invention comprise, or alternatively consist of, one, two, three, four, five or more of the predicted epitopes described in Table 1A. It will be appreciated that depending on the analytical criteria used to predict antigenic determinants, the exact address of the determinant may vary slightly. Column 7, “Tissue Distribution” shows the expression profile of tissue, cells, and/or cell line libraries which express the polynucleotides of the invention. The first number in column 7 (preceding the colon), represents the tissue/cell source identifier code corresponding to the code and description provided in Table 4. Expression of these polynucleotides was not observed in the other tissues and/or cell libraries tested. For those identifier codes in which the first two letters are not “AR”, the second number in column 7 (following the colon), represents the number of times a sequence corresponding to the reference polynucleotide sequence (e.g., SEQ ID NO:X) was identified in the tissue/cell source. Those tissue/cell source identifier codes in which the first two letters are “AR” designate information generated using DNA array technology. Utilizing this technology, cDNAs were amplified by PCR and then transferred, in duplicate, onto the array. Gene expression was assayed through hybridization of first strand cDNA probes to the DNA array. cDNA probes were generated from total RNA extracted from a variety of different tissues and cell lines. Probe synthesis was performed in the presence of ³³P dCTP, using oligo(dT) to prime reverse transcription. After hybridization, high stringency washing conditions were employed to remove non-specific hybrids from the array. The remaining signal, emanating from each gene target, was measured using a Phosphorimager. Gene expression was reported as Phosphor Stimulating Luminescence (PSL) which reflects the level of phosphor signal generated from the probe hybridized to each of the gene targets represented on the array. A local background signal subtraction was performed before the total signal generated from each array was used to normalize gene expression between the different hybridizations. The value presented after “[array code]:” represents the mean of the duplicate values, following background subtraction and probe normalization. One of skill in the art could routinely use this information to identify normal and/or diseased tissue(s) which show a predominant expression pattern of the corresponding polynucleotide of the invention or to identify polynucleotides which show predominant and/or specific tissue and/or cell expression. Column 8, “Cytologic Band,” provides the chromosomal location of polynucleotides corresponding to SEQ ID NO:X. Chromosomal location was determined by finding exact matches to EST and CDNA sequences contained in the NCBI (National Center for Biotechnology Information) UniGene database. Given a presumptive chromosomal location, disease locus association was determined by comparison with the Morbid Map, derived from Online Mendelian Inheritance in Man (Online Mendelian Inheritance in Man, OMIM™. McKusick-Nathans Institute for Genetic Medicine, Johns Hopkins University (Baltimore, Md.) and National Center for Biotechnology Information, National Library of Medicine (Bethesda, Md.) 2000. World Wide Web URL: http://www.ncbi.nlm.nih.gov/omim/). If the putative chromosomal location of the Query overlapped with the chromosomal location of a Morbid Map entry, an OMIM identification number is provided in column 9 labeled “OMIM Disease Reference(s)”. A key to the OMIM reference identification numbers is provided in Table 5.

[0019] Table 1B summarizes additional polynucleotides encompassed by the invention (including cDNA clones related to the sequences (Clone ID NO:Z), contig sequences (contig identifier (Contig ID:) contig nucleotide sequence identifiers (SEQ ID NO:X)), and genomic sequences (SEQ ID NO:B). The first column provides a unique clone identifier, “Clone ID NO:Z”, for a cDNA clone related to each contig sequence. The second column provides the sequence identifier, “SEQ ID NO:X”, for each contig sequence. The third column provides a unique contig identifier, “Contig ID:” for each contig sequence. The fourth column, provides a BAC identifier “BAC ID NO:A” for the BAC clone referenced in the corresponding row of the table. The fifth column provides the nucleotide sequence identifier, “SEQ ID NO:B” for a fragment of the BAC clone identified in column four of the corresponding row of the table. The sixth column, “Exon From-To”, provides the location (i.e., nucleotide position numbers) within the polynucleotide sequence of SEQ ID NO:B which delineate certain polynucleotides of the invention that are also exemplary members of polynucleotide sequences that encode polypeptides of the invention (e.g., polypeptides containing amino acid sequences encoded by the polynucleotide sequences delineated in column six, and fragments and variants thereof).

[0020] Table 2 summarizes homology and features of some of the polypeptides of the invention. The first column provides a unique clone identifier, “Clone ID NO:Z”, corresponding to a cDNA disclosed in Table 1A. The second column provides the unique contig identifier, “Contig ID:” corresponding to contigs in Table 1A and allowing for correlation with the information in Table 1A. The third column provides the sequence identifier, “SEQ ID NO:X”, for the contig polynucleotide sequences. The fourth column provides the analysis method by which the homology/identity disclosed in the row was determined. Comparisons were made between polypeptides encoded by the polynucleotides of the invention and either a non-redundant protein database (herein referred to as “NR”), or a database of protein families (herein referred to as “PFAM”) as further described below. The fifth column provides a description of PFAM/NR hits having significant matches to a polypeptide of the invention. Column six provides the accession number of the PFAM/NR hit disclosed in the fifth column. Column seven, “Score/Percent Identity”, provides a quality score or the percent identity, of the hit disclosed in column five. Columns 8 and 9, “NT From” and “NT To” respectively, delineate the polynucleotides in “SEQ ID NO:X” that encode a polypeptide having a significant match to the PFAM/NR database as disclosed in the fifth column. In specific embodiments, polypeptides of the invention comprise, or alternatively consist of, an amino acid sequence encoded by the polynucleotides in SEQ ID NO:X as delineated in columns 8 and 9, or fragments or variants thereof.

[0021] Table 3 provides polynucleotide sequences that may be disclaimed according to certain embodiments of the invention. The first column provides a unique clone identifier, “Clone ID NO:Z”, for a cDNA clone related to ovarian and/or breast cancer associated contig sequences disclosed in Table 1A. The second column provides the sequence identifier, “SEQ ID NO:X”, for contig polynucleotide sequences disclosed in Table 1A. The third column provides the unique contig identifier, “Contig ID”, for contigs disclosed in Table 1A. The fourth column provides a unique integer ‘a’ where ‘a’ is any integer between 1 and the final nucleotide minus 15 of SEQ ID NO:X, represented as “Range of a”, and the fifth column provides a unique integer ‘b’ where ‘b’ is any integer between 15 and the final nucleotide of SEQ ID NO:X, represented as “Range of b”, where both a and b correspond to the positions of nucleotide residues shown in SEQ ID NO:X, and where b is greater than or equal to a+14. For each of the polynucleotides shown as SEQ ID NO:X, the uniquely defined integers can be substituted into the general formula of a-b, and used to describe polynucleotides which may be preferably excluded from the invention. In certain embodiments, preferably excluded from the polynucleotides of the invention (including polynucleotide fragments and variants as described herein and diagnostic and/or therapeutic uses based on these polynucleotides) are at least one, two, three, four, five, ten, or more of the polynucleotide sequence(s) having the accession number(s) disclosed in the sixth column of this Table (including for example, published sequence in connection with a particular BAC clone). In further embodiments, preferably excluded from the invention are the specific polynucleotide sequence(s) contained in the clones corresponding to at least one, two, three, four, five, ten, or more of the available material having the accession numbers identified in the sixth column of this Table (including for example, the actual sequence contained in an identified BAC clone).

[0022] Table 4 provides a key to the tissue/cell source identifier code disclosed in Table 1A, column 7. Column 1 provides the key to the tissue/cell source identifier code disclosed in Table 1A, Column 7. Columns 2-5 provide a description of the tissue or cell source. Codes corresponding to diseased tissues are indicated in column 6 with the word “disease”. The use of the word “disease” in column 6 is non-limiting. The tissue or cell source may be specific (e.g. a neoplasm), or may be disease-associated (e.g., a tissue sample from a normal portion of a diseased organ). Furthermore, tissues and/or cells lacking the “disease” designation may still be derived from sources directly or indirectly involved in a disease state or disorder, and therefore may have a further utility in that disease state or disorder. In numerous cases where the tissue/cell source is a library, column 7 identifies the vector used to generate the library.

[0023] Table 5 provides a key to the OMIM™ reference identification numbers disclosed in Table 1A, column 9. OMIM reference identification numbers (Column 1) were derived from Online Mendelian Inheritance in Man (Online Mendelian Inheritance in Man, OMIM™. McKusick-Nathans Institute for Genetic Medicine, Johns Hopkins University (Baltimore, Md.) and National Center for Biotechnology Information, National Library of Medicine, (Bethesda, Md.) 2000. World Wide Web URL: http://www.ncbi.nlm.nih.gov/omim/). Column 2 provides diseases associated with the cytologic band disclosed in Table 1A, column 8, as determined from the Morbid Map database.

[0024] Table 6 summarizes ATCC Deposits, Deposit dates, and ATCC designation numbers of deposits made with the ATCC in connection with the present application.

[0025] Table 7 shows the cDNA libraries sequenced, tissue source description, vector information and ATCC designation numbers relating to these cDNA libraries.

[0026] Table 8 provides a physical characterization of clones encompassed by the invention. The first column provides the unique clone identifier, “Clone ID NO:Z”, for certain cDNA clones of the invention, as described in Table 1A. The second column provides the size of the cDNA insert contained in the corresponding cDNA clone.

[0027] Definitions

[0028] The following definitions are provided to facilitate understanding of certain terms used throughout this specification.

[0029] In the present invention, “isolated” refers to material removed from its original environment (e.g., the natural environment if it is naturally occurring), and thus is altered “by the hand of man” from its natural state. For example, an isolated polynucleotide could be part of a vector or a composition of matter, or could be contained within a cell, and still be “isolated” because that vector, composition of matter, or particular cell is not the original environment of the polynucleotide. The term “isolated” does not refer to genomic or cDNA libraries, whole cell total or mRNA preparations, genomic DNA preparations (including those separated by electrophoresis and transferred onto blots), sheared whole cell genomic DNA preparations or other compositions where the art demonstrates no distinguishing features of the polynucleotide sequences of the present invention.

[0030] As used herein, a “polynucleotide” refers to a molecule having a nucleic acid sequence encoding SEQ ID NO:Y or a fragment or variant thereof; a nucleic acid sequence contained in SEQ ID NO:X (as described in column 3 of Table 1A) or the complement thereof; a cDNA sequence contained in Clone ID NO:Z (as described in column 1 of Table 1A and contained within a library deposited with the ATCC); a nucleotide sequence encoding the polypeptide encoded by a nucleotide sequence in SEQ ID NO:B as defined in column 6 of Table 1B or a fragment or variant thereof; or a nucleotide coding sequence in SEQ ID NO:B as defined in column 6 of Table 1B or the complement thereof. For example, the polynucleotide can contain the nucleotide sequence of the full length cDNA sequence, including the 5′ and 3′ untranslated sequences, the coding region, as well as fragments, epitopes, domains, and variants of the nucleic acid sequence. Moreover, as used herein, a “polypeptide” refers to a molecule having an amino acid sequence encoded by a polynucleotide of the invention as broadly defined (obviously excluding poly-Phenylalanine or poly-Lysine peptide sequences which result from translation of a polyA tail of a sequence corresponding to a cDNA).

[0031] As used herein, a “ovarian and/or breast cancer antigen” refers collectively to any polynucleotide disclosed herein (e.g., a nucleic acid sequence contained in SEQ ID NO:X or the complement therof, or cDNA sequence contained in Clone ID NO:Z, or a nucleotide sequence encoding the polypeptide encoded by a nucleotide sequence in SEQ ID NO:B as defined in column 6 of Table 1B, or a nucleotide coding sequence in SEQ ID NO:B as defined in column 6 of Table 1B or the complement thereof and fragments or variants thereof as described herein) or any polypeptide disclosed herein (e.g., an amino acid sequence contained in SEQ ID NO:Y, an amino acid sequence encoded by SEQ ID NO:X, or the complement thereof, an amino acid sequence encoded by the cDNA sequence contained in Clone ID NO:Z, an amino acid sequence encoded by SEQ ID NO:B, or the complement thereof, and fragments or variants thereof as described herein). These ovarian and/or breast cancer antigens have been determined to be predominantly expressed in ovarian and/or breast tissues, including normal or diseased tissues (as shown in Table 1A column 7 and Table 4).

[0032] In the present invention, “SEQ ID NO:X” was often generated by overlapping sequences contained in multiple clones (contig analysis). A representative clone containing all or most of the sequence for SEQ ID NO:X is deposited at Human Genome Sciences, Inc. (HGS) in a catalogued and archived library. As shown, for example, in column 1 of Table 1A, each clone is identified by a cDNA Clone ID (identifier generally referred to herein as Clone ID NO:Z). Each Clone ID is unique to an individual clone and the Clone ID is all the information needed to retrieve a given clone from the HGS library. Furthermore, certain clones disclosed in this application have been deposited with the ATCC on Oct. 5, 2000, having the ATCC designation numbers PTA 2574 and PTA 2575; and on Jan. 5, 2001, having the depositor reference numbers TS-1, TS-2, AC-1, and AC-2. In addition to the individual cDNA clone deposits, most of the cDNA libraries from which the clones were derived were deposited at the American Type Culture Collection (hereinafter “ATCC”). Table 7 provides a list of the deposited cDNA libraries. One can use the Clone ID NO:Z to determine the library source by reference to Tables 6 and 7. Table 7 lists the deposited cDNA libraries by name and links each library to an ATCC Deposit. Library names contain four characters, for example, “HTWE.” The name of a cDNA clone (Clone ID NO:Z) isolated from that library begins with the same four characters, for example “HTWEP07”. As mentioned below, Table 1A correlates the Clone ID NO:Z names with SEQ ID NO:X. Thus, starting with an SEQ ID NO:X, one can use Tables 1A, 6 and 7 to determine the corresponding Clone ID NO:Z, which library it came from and which ATCC deposit the library is contained in. Furthermore, it is possible to retrieve a given cDNA clone from the source library by techniques known in the art and described elsewhere herein. The ATCC is located at 10801 University Boulevard, Manassas, Va. 20110-2209, USA. The ATCC deposits were made pursuant to the terms of the Budapest Treaty on the international recognition of the deposit of microorganisms for the purposes of patent procedure.

[0033] In specific embodiments, the polynucleotides of the invention are at least 15, at least 30, at least 50, at least 100, at least 125, at least 500, or at least 1000 continuous nucleotides but are less than or equal to 300 kb, 200 kb, 100 kb, 50 kb, 15 kb, 10 kb, 7.5 kb, 5 kb, 2.5 kb, 2.0 kb, or 1 kb, in length. In a further embodiment, polynucleotides of the invention comprise a portion of the coding sequences, as disclosed herein, but do not comprise all or a portion of any intron. In another embodiment, the polynucleotides comprising coding sequences do not contain coding sequences of a genomic flanking gene (i.e., 5′ or 3′ to the gene of interest in the genome). In other embodiments, the polynucleotides of the invention do not contain the coding sequence of more than 1000, 500, 250, 100, 50, 25, 20, 15, 10, 5, 4, 3, 2, or 1 genomic flanking gene(s).

[0034] A “polynucleotide” of the present invention also includes those polynucleotides capable of hybridizing, under stringent hybridization conditions, to sequences contained in SEQ ID NO:X, or the complement thereof (e.g., the complement of any one, two, three, four, or more of the polynucleotide fragments described herein), the polynucleotide sequence delineated in columns 8 and 9 of Table 2 or the complement thereof, and/or cDNA sequences contained in Clone ID NO:Z (e.g., the complement of any one, two, three, four, or more of the polynucleotide fragments, or the cDNA clone within the pool of cDNA clones deposited with the ATCC, described herein) and/or the polynucleotide sequence delineated in column 6 of Table 1B or the complement thereof. “Stringent hybridization conditions” refers to an overnight incubation at 42 degree C. in a solution comprising 50% formamide, 5× SSC (750 mM NaCl, 75 mM trisodium citrate), 50 mM sodium phosphate (pH 7.6), 5× Denhardt's solution, 10% dextran sulfate, and 20 μg/ml denatured, sheared salmon sperm DNA, followed by washing the filters in 0.1× SSC at about 65 degree C.

[0035] Also contemplated are nucleic acid molecules that hybridize to the polynucleotides of the present invention at lower stringency hybridization conditions. Changes in the stringency of hybridization and signal detection are primarily accomplished through the manipulation of formamide concentration (lower percentages of formamide result in lowered stringency), salt conditions, or temperature. For example, lower stringency conditions include an overnight incubation at 37 degree C. in a solution comprising 6× SSPE (20× SSPE=3M NaCl; 0.2M NaH₂PO₄; 0.02M EDTA, pH 7.4), 0.5% SDS, 30% formamide, 100 ug/ml salmon sperm blocking DNA; followed by washes at 50 degree C. with 1× SSPE, 0.1% SDS. In addition, to achieve even lower stringency, washes performed following stringent hybridization can be done at higher salt concentrations (e.g. 5× SSC).

[0036] Note that variations in the above conditions may be accomplished through the inclusion and/or substitution of alternate blocking reagents used to suppress background in hybridization experiments. Typical blocking reagents include Denhardt's reagent, BLOTTO, heparin, denatured salmon sperm DNA, and commercially available proprietary formulations. The inclusion of specific blocking reagents may require modification of the hybridization conditions described above, due to problems with compatibility.

[0037] Of course, a polynucleotide which hybridizes only to polyA+sequences (such as any 3′ terminal polyA+ tract of a cDNA shown in the sequence listing), or to a complementary stretch of T (or U) residues, would not be included in the definition of “polynucleotide,” since such a polynucleotide would hybridize to any nucleic acid molecule containing a poly (A) stretch or the complement thereof (e.g., practically any double-stranded cDNA clone generated using oligo dT as a primer).

[0038] The polynucleotide of the present invention can be composed of any polyribonucleotide or polydeoxribonucleotide, which may be unmodified RNA or DNA or modified RNA or DNA. For example, polynucleotides can be composed of single- and double-stranded DNA, DNA that is a mixture of single- and double-stranded regions, single- and double-stranded RNA, and RNA that is mixture of single- and double-stranded regions, hybrid molecules comprising DNA and RNA that may be single-stranded or, more typically, double-stranded or a mixture of single- and double-stranded regions. In addition, the polynucleotide can be composed of triple-stranded regions comprising RNA or DNA or both RNA and DNA. A polynucleotide may also contain one or more modified bases or DNA or RNA backbones modified for stability or for other reasons. “Modified” bases include, for example, tritylated bases and unusual bases such as inosine. A variety of modifications can be made to DNA and RNA; thus, “polynucleotide” embraces chemically, enzymatically, or metabolically modified forms.

[0039] The polypeptide of the present invention can be composed of amino acids joined to each other by peptide bonds or modified peptide bonds, i.e., peptide isosteres, and may contain amino acids other than the 20 gene-encoded amino acids. The polypeptides may be modified by either natural processes, such as posttranslational processing, or by chemical modification techniques which are well known in the art. Such modifications are well described in basic texts and in more detailed monographs, as well as in a voluminous research literature. Modifications can occur anywhere in a polypeptide, including the peptide backbone, the amino acid side-chains and the amino or carboxyl termini. It will be appreciated that the same type of modification may be present in the same or varying degrees at several sites in a given polypeptide. Also, a given polypeptide may contain many types of modifications. Polypeptides may be branched, for example, as a result of ubiquitination, and they may be cyclic, with or without branching. Cyclic, branched, and branched cyclic polypeptides may result from posttranslation natural processes or may be made by synthetic methods. Modifications include acetylation, acylation, ADP-ribosylation, amidation, covalent attachment of flavin, covalent attachment of a heme moiety, covalent attachment of a nucleotide or nucleotide derivative, covalent attachment of a lipid or lipid derivative, covalent attachment of phosphotidylinositol, cross-linking, cyclization, disulfide bond formation, demethylation, formation of covalent cross-links, formation of cysteine, formation of pyroglutamate, formylation, gamma-carboxylation, glycosylation, GPI anchor formation, hydroxylation, iodination, methylation, myristoylation, oxidation, pegylation, proteolytic processing, phosphorylation, prenylation, racemization, selenoylation, sulfation, transfer-RNA mediated addition of amino acids to proteins such as arginylation, and ubiquitination. (See, for instance, PROTEINS—STRUCTURE AND MOLECULAR PROPERTIES, 2nd Ed., T. E. Creighton, W. H. Freeman and Company, New York (1993); POSTTRANSLATIONAL COVALENT MODIFICATION OF PROTEINS, B. C. Johnson, Ed., Academic Press, New York, pgs. 1-12 (1983); Seifter et al., Meth. Enzymol. 182:626-646 (1990); Rattan et al., Ann. N.Y. Acad. Sci. 663:48-62 (1992).)

[0040] “SEQ ID NO:X” refers to a polynucleotide sequence described, for example, in Tables 1A or 2, while “SEQ ID NO:Y” refers to a polypeptide sequence described in column 5 of Table 1A. SEQ ID NO:X is identified by an integer specified in column 3 of Table 1A. The polypeptide sequence SEQ ID NO:Y is a translated open reading frame (ORF) encoded by polynucleotide SEQ ID NO:X. “Clone ID NO:Z” refers to a cDNA clone described in column 1 of Table 1A.

[0041] “A polypeptide having biological activity” refers to a polypeptide exhibiting activity similar to, but not necessarily identical to, an activity of a polypeptide of the present invention, including mature forms, as measured in a particular biological assay, with or without dose dependency. In the case where dose dependency does exist, it need not be identical to that of the polypeptide, but rather substantially similar to the dose-dependence in a given activity as compared to the polypeptide of the present invention (i.e., the candidate polypeptide will exhibit greater activity or not more than about 25-fold less and, preferably, not more than about tenfold less activity, and most preferably, not more than about three-fold less activity relative to the polypeptide of the present invention).

[0042] Table 1A summarizes some of the polynucleotides encompassed by the invention (including contig sequences (SEQ ID NO:X) and clones (Clone ID NO:Z) and further summarizes certain characteristics of these polynucleotides and the polypeptides encoded thereby.

[0043] Polynucleotides and Polypeptides

TABLE 1A

| | | | | | | Tissue | | |
|---|---|---|---|---|---|---|---|---|
| | | | | | | Distribution | | |
| | | SEQ | | AA | | Library code: | | |
| Clone | | ID | | SEQ | | count (see | | OMIM |
| ID | Contig | NO: | ORF | ID | Predicted | TABLE IV for | Cytologic | Disease |
| NO: Z | ID: | X | (From-To) | NO: Y | Epitopes | Library Codes) | Band | Reference(s): |
| HBCJS08 | 957826 | 11 | 228-374 | 249 | Val-17 to Thr-27. | H0664: 2 | | |
| HBCQJ03 | 922401 | 12 | 138-1 | 250 | Arg-1 to Trp-15. | H0663: 2 | | |
| HBCQS90 | 951787 | 13 | 3-317 | 251 | Glu-24 to Lys-29, | H0663: 2, L0758: 2, | | |
| | | | | | Lys-35 to Gln-40. | L0748: 1 and L0591: 1. | | |
| HBGBD28 | 525846 | 14 | 3-185 | 252 | Asn-37 to Gly-44. | H0181: 2 | | |
| HBGBS07 | 954299 | 15 | 1-324 | 253 | Val-57 to Leu-66, | H0181: 2 | 1q21 | 104770, |
| | | | | | Val-79 to Gly-84. | | | 107670, |
| | | | | | | | | 110700, |
| | | | | | | | | 135940, |
| | | | | | | | | 145001, |
| | | | | | | | | 146790, |
| | | | | | | | | 152445, |
| | | | | | | | | 152445, |
| | | | | | | | | 159001, |
| | | | | | | | | 174000, |
| | | | | | | | | 179755, |
| | | | | | | | | 182860, |
| | | | | | | | | 182860, |
| | | | | | | | | 182860, |
| | | | | | | | | 191315, |
| | | | | | | | | 230800, |
| | | | | | | | | 230800, |
| | | | | | | | | 266200, |
| | | | | | | | | 600897, |
| | | | | | | | | 601105, |
| | | | | | | | | 601412, |
| | | | | | | | | 601652, |
| | | | | | | | | 602491 |
| HBGBT79 | 525352 | 16 | 109-306 | 254 | Arg-7 to Trp-17. | H0181: 2 | | |
| HBGDA44 | 525618 | 17 | 163-507 | 255 | Thr-1 to Pro-6. | H0181: 2 | | |
| HBGDE85 | 524875 | 18 | 1-132 | 256 | Pro-6 to Leu-12. | H0181: 2 | | |
| HBGDT43 | 974223 | 19 | 2-220 | 257 | Trp-8 to Gln-20. | H0181: 3 | | |
| HCBNW02 | 950897 | 20 | 183-521 | 258 | | H0661: 2 | | |
| HCBNW07 | 951820 | 21 | 8-130 | 259 | Lys-28 to Phe-34. | L0770: 3, L0776: 3, | | |
| | | | | | | H0686: 1, H0661: 1, | | |
| | | | | | | L0021: 1, L0761: 1, | | |
| | | | | | | L0766: 1, L0659: 1, | | |
| | | | | | | L0647: 1, L0752: 1 and | | |
| | | | | | | L0605: 1. | | |
| HCBOG03 | 922351 | 22 | 2-283 | 260 | Lys-33 to Arg-38. | H0661: 2 | | |
| HCOOG04 | 925748 | 23 | 68-3 | 261 | Tyr-10 to Cys-17. | H0670: 2 | | |
| HCOOI07 | 951665 | 24 | 75-458 | 262 | Ser-40 to Gly-45, | H0670: 2 | | |
| | | | | | Pro-55 to Asp-67. | | | |
| HCOOM77 | 969161 | 25 | 83-283 | 263 | | H0670: 2 | | |
| HCOQE11 | 965299 | 26 | 409-684 | 264 | Gln-20 to Tyr-25, | H0670: 4, L0776: 2, | | |
| | | | | | Asp-73 to Ser-79. | L0666: 2, L0759: 2, | | |
| | | | | | | H0661: 1, L0717: 1, | | |
| | | | | | | L0664: 1, L0779: 1, | | |
| | | | | | | L0777: 1, L0752: 1 and | | |
| | | | | | | L0755: 1. | | |
| HCOQH12 | 969151 | 27 | 292-564 | 265 | Ala-52 to Lys-58, | H0670: 2 and L0366: | | |
| | | | | | Gly-72 to Arg-79. | 1. | | |
| HCOQQ07 | 951658 | 28 | 187-429 | 266 | | H0670: 2 | | |
| HOCMU03 | 922418 | 29 | 8-220 | 267 | Asp-9 to Lys-20, | H0660: 2 | | |
| | | | | | Ser-25 to Glu-30, | | | |
| | | | | | Pro-57 to Asn-63. | | | |
| HOCPJ03 | 917484 | 30 | 3-185 | 268 | | H0660: 2 | | |
| HOCQA47 | 954934 | 31 | 286-450 | 269 | Asn-1 to Ala-7, | L0659: 1, L2245: 1, | | |
| | | | | | Leu-19 to Cys-24, | H0682: 1 and H0660:1. | | |
| | | | | | Pro-43 to Lys-55. | | | |
| HODEA90 | 782242 | 32 | 391-534 | 270 | | H0615: 3 | | |
| HODEB04 | 927022 | 33 | 1-282 | 271 | | H0615: 3 | | |
| HODEC76 | 952204 | 34 | 350-514 | 272 | | H0615: 2 | | |
| HODED11 | 966085 | 35 | 42-218 | 273 | Ile-12 to Thr-20, | H0615: 3 | | |
| | | | | | Tyr-47 to Gly-57. | | | |
| HODED55 | 859368 | 36 | 24-296 | 274 | Thr-34 to Ser-40. | H0615: 2 | | |
| HODEF10 | 963494 | 37 | 235-480 | 275 | | H0615: 2 | | |
| HODEF87 | 974342 | 38 | 27-266 | 276 | | H0615: 3 | | |
| HODEG86 | 784833 | 39 | 373-648 | 277 | | H0615: 3 | | |
| HODEH08 | 963895 | 40 | 2-142 | 278 | Pro-3 to Thr-10, | H0615: 2 | | |
| | | | | | Ser-38 to Pro-47. | | | |
| HODEH22 | 974329 | 41 | 101-295 | 279 | | H0615: 3 | | |
| HODEI13 | 859318 | 42 | 66-227 | 280 | Ile-9 to Cys-14, | H0615: 3 | | |
| | | | | | Pro-22 to Gly-27. | | | |
| HODEI48 | 841906 | 43 | 511-633 | 281 | Lys-1 to Ser-10. | H0615: 3 | | |
| HODEK50 | 859307 | 44 | 363-740 | 282 | Ser-25 to Pro-30, | H0615: 3 | | |
| | | | | | Pro-84 to Glu-92. | | | |
| HODEL92 | 859313 | 45 | 45-188 | 283 | | H0615: 2 | | |
| HODEN75 | 772940 | 46 | 312-458 | 284 | | H0615: 2 | | |
| HODE087 | 930735 | 47 | 1-159 | 285 | Val-9 to Val-15. | H0615: 2 | | |
| HODEP04 | 926984 | 48 | 69-269 | 286 | | H0615: 2 | | |
| HODEP12 | 965534 | 49 | 115-381 | 287 | | H0615: 2 | | |
| HODEP86 | 784846 | 50 | 215-364 | 288 | | H0615: 2 | | |
| HODEQ28 | 972808 | 51 | 206-331 | 289 | Thr-1 to Ser-13. | H0615: 3 | | |
| HODEQ79 | 859287 | 52 | 246-479 | 290 | | H0615: 2 | | |
| HODES86 | 784815 | 53 | 3-278 | 291 | | L0753: 3, H0615: 1 | | |
| | | | | | | and H0683: 1. | | |
| HODET03 | 922988 | 54 | 27-191 | 292 | Val-36 to Gly-42. | H0615: 2 | | |
| HODEV13 | 859302 | 55 | 433-639 | 293 | Asn-37 to Lys-42. | H0615: 2 | | |
| HODEX10 | 926260 | 56 | 22-159 | 294 | Met-1 to Arg-6, | AR061: 6, AR089: 3 | | |
| | | | | | Ser-16 to Lys-29. | H0615: 5 | | |
| HODEX31 | 922473 | 57 | 129-524 | 295 | Pro-19 to Gly-45. | H0615: 2 | | |
| HODEY08 | 972984 | 58 | 425-667 | 296 | Glu-1 to Lys-7, | H0615: 2 | | |
| | | | | | Thr-34 to Asn-43. | | | |
| HODEY13 | 859323 | 59 | 179-382 | 297 | | H0615: 2 | | |
| HODEY80 | 859296 | 60 | 432-677 | 298 | Gln-36 to Gly-41. | H0615: 2 | | |
| HODEZ11 | 952166 | 61 | 178-336 | 299 | | H0615: 2 | | |
| HODFA38 | 934266 | 62 | 170-397 | 300 | Ser-9 to Gly-15, | H0615: 3 | | |
| | | | | | Pro-22 to Lys-27, | and L0367:1. | | |
| | | | | | Glu-43 to Glu-56. | | | |
| HODFB05 | 929733 | 63 | 451-639 | 301 | | H0615: 2 | | |
| HODFB57 | 972810 | 64 | 2-217 | 302 | Thr-1 to Ser-16. | H0615: 2 | | |
| HODFB88 | 792979 | 65 | 449-634 | 303 | | H0615: 2 | | |
| HODFD08 | 958371 | 66 | 133-270 | 304 | | H0615: 2 | | |
| HODFD10 | 963516 | 67 | 325-465 | 305 | | H0615: 2 | | |
| HODFD45 | 780531 | 68 | 169-399 | 306 | | H0615: 2 | | |
| HODFE69 | 859338 | 69 | 2-301 | 307 | Arg-46 to Ser-57, | H0615: 2 | | |
| | | | | | Thr-67 to Cys-78. | | | |
| HODFG37 | 782219 | 70 | 263-433 | 308 | | H0615: 2 | | |
| HODFH02 | 915257 | 71 | 33-164 | 309 | Gln-15 to Ser-23, | H0615: 3 | | |
| | | | | | Gly-30 to Lys-36. | | | |
| HODFH76 | 783783 | 72 | 143-391 | 310 | Lys-32 to Ser-37. | H0615: 2 | | |
| HODFK18 | 974313 | 73 | 44-343 | 311 | Ala-14 to Ser-38. | H0615: 5 | | |
| | | | | | | and L0665: 2. | | |
| HODFK94 | 974318 | 74 | 42-182 | 312 | Ser-7 to Lys-15, | H0615: 3 | | |
| | | | | | Val-17 to Pro-29. | | | |
| HODFL91 | 918456 | 75 | 1-159 | 313 | Pro-45 to Cys-51. | H0615: 2 | | |
| HODFN19 | 859334 | 76 | 198-425 | 314 | | H0615: 2 | | |
| HODFO37 | 859314 | 77 | 85-306 | 315 | Trp-44 to Thr-54. | H0615: 2 | | |
| HODFQ02 | 918637 | 78 | 427-615 | 316 | Tyr-1 to Cys-14, | H0615: 3 | | |
| | | | | | Gln-20 to Ile-47. | | | |
| HODFQ06 | 934304 | 79 | 258-401 | 317 | Thr-1 to Asn-6. | H0615: 2 | | |
| HODFT52 | 915232 | 80 | 224-51 | 318 | | H0615: 2 | | |
| HODFU02 | 918536 | 81 | 204-398 | 319 | | H0615: 2 | | |
| HODFU06 | 934229 | 82 | 460-588 | 320 | Thr-1 to Ser-6. | H0615: 3 | | |
| HODFU47 | 806232 | 83 | 274-582 | 321 | Glu-1 to His-6, | H0615: 2 | | |
| | | | | | Phe-13 to Pro-23, | and L0558: 1. | | |
| | | | | | Arg-29 to Leu-34, | | | |
| | | | | | Pro-54 to Asp-60, | | | |
| | | | | | Pro-62 to Gly-67. | | | |
| HODFU54 | 965526 | 84 | 60-134 | 322 | | H0615: 2 | | |
| HODFW17 | 859322 | 85 | 370-603 | 323 | | H0615: 2 | | |
| HODFX57 | 975259 | 86 | 1-183 | 324 | | H0615: 3 | | |
| HODFY16 | 958329 | 87 | 163-309 | 325 | | AR061: 6, AR089: 3 | | |
| | | | | | | H0615: 2 and | | |
| | | | | | | L0766: 1. | | |
| HODFY79 | 975253 | 88 | 393-259 | 326 | | H0615: 3 | | |
| HODGC04 | 926863 | 89 | 83-214 | 327 | Glu-9 to Gln-21. | H0615: 2 | | |
| HODGC61 | 973449 | 90 | 43-324 | 328 | Thr-50 to Gln-57. | AR061: 8, AR089: 5 | | |
| | | | | | | H0615: 3 | | |
| HODGD05 | 931071 | 91 | 1-147 | 329 | Ala-8 to Gln-29, | H0615: 2 | | |
| | | | | | Ser-36 to Gly-44. | | | |
| HODGH02 | 917969 | 92 | 28-285 | 330 | His-8 to Gly-18, | H0615: 2 | | |
| | | | | | Leu-37 to Lys-42. | | | |
| HODGH04 | 926255 | 93 | 10-159 | 331 | His-8 to Gly-18, | H0615: 2 | | |
| | | | | | Gly-26 to Arg-33. | | | |
| HODGH07 | 951933 | 94 | 178-330 | 332 | | H0615: 2 | | |
| HODGH11 | 965105 | 95 | 383-556 | 333 | | H0615: 2 | | |
| HODGI08 | 958235 | 96 | 1-267 | 334 | Arg-11 to Thr-29. | H0615: 2 | | |
| HODGJ67 | 974297 | 97 | 3-353 | 335 | Ser-2 to Thr-13, | H0615: 3 | | |
| | | | | | Ile-16 to Ser-26, | | | |
| | | | | | Pro-28 to Gln-36, | | | |
| | | | | | Gln-41 to Pro-47. | | | |
| HODGM46 | 974051 | 98 | 2-304 | 336 | Phe-81 to Phe-87. | H0615: 3 | | |
| HODGO46 | 883087 | 99 | 292-525 | 337 | | H0615: 2 | | |
| HODGP37 | 974293 | 100 | 67-228 | 338 | | H0615: 3 | | |
| HODGP83 | 889967 | 101 | 3-236 | 339 | | H0615: 2 | | |
| HODGP95 | 908650 | 102 | 23-358 | 340 | Lys-38 to Arg-44, | AR089: 8, AR061: 3 | | |
| | | | | | Thr-84 to Asp-99. | H0615: 2 | | |
| HODGQ08 | 958237 | 103 | 261-377 | 341 | | H0615: 2 | | |
| HODGQ22 | 974290 | 104 | 117-245 | 342 | | H0615: 3 | | |
| HODGQ32 | 974294 | 105 | 175-405 | 343 | Val-1 to Lys-7, | H0615: 3 | | |
| | | | | | Gln-12 to Arg-18, | | | |
| | | | | | Arg-22 to Gln-30, | | | |
| | | | | | Gly-32 to Glu-40. | | | |
| HODGQ92 | 894368 | 106 | 2-274 | 344 | Asp-42 to Arg-47, | AR061: 5, AR089: 2 | | |
| | | | | | Gln-84 to Gly-91. | H0615: 2 | | |
| HODGT62 | 974052 | 107 | 253-402 | 345 | | H0615: 3 | | |
| HODGW08 | 958277 | 108 | 183-371 | 346 | Ala-11 to Cys-16. | H0615: 2 | | |
| HODGX10 | 963427 | 109 | 206-310 | 347 | | H0615: 3 | | |
| HODGX29 | 913879 | 110 | 138-257 | 348 | | H0615: 2 and | | |
| | | | | | | H0658: 1. | | |
| HODGZ06 | 933783 | 111 | 315-479 | 349 | | H0615: 2 | | |
| HODGZ10 | 961977 | 112 | 3-119 | 350 | | H0615: 2 | | |
| HODHC03 | 922987 | 113 | 3-341 | 351 | Pro-59 to Pro-65, | H0615: 2 and | | |
| | | | | | Glu-96 to Phe-113. | L0777:1. | | |
| HODHG71 | 926203 | 114 | 190-384 | 352 | Asp-1 to Lys-20, | H0615: 2 | | |
| | | | | | Cys-34 to Ser-42. | | | |
| HQDHK02 | 918613 | 115 | 108-302 | 353 | | H0615: 3 | | |
| HODHL19 | 973433 | 116 | 79-315 | 354 | | H0615: 3 | | |
| HODHO11 | 965529 | 117 | 36-137 | 355 | | H0615: 2 | | |
| HODHS34 | 965460 | 118 | 285-461 | 356 | | H0615: 2 | | |
| HODHY53 | 914554 | 119 | 47-214 | 357 | | H0615: 2 | | |
| HODJR03 | 922484 | 120 | 134-379 | 358 | | H0615: 3 | | |
| HODJY33 | 951404 | 121 | 31-384 | 359 | Lys-30 to Arg-36. | H0615: 3 | | |
| HODJZ90 | 965049 | 122 | 41-169 | 360 | Lys-8 to Ser-14. | H0615: 2 | | |
| HODKN07 | 933320 | 123 | 92-256 | 361 | His-20 to Val-35. | H0615: 2 and | | |
| | | | | | | L0060: 1. | | |
| HOVJA10 | 961467 | 124 | 37-225 | 362 | | H0688: 3 | | |
| HPCPF05 | 927168 | 125 | 88-249 | 363 | | H0659: 2 | | |
| HPCPO07 | 951826 | 126 | 3-128 | 364 | Gly-29 to Tyr-34. | H0659: 2 | | |
| HPDOY06 | 929318 | 127 | 22-201 | 365 | | H0658: 2 | | |
| HPDPK12 | 969340 | 128 | 155-316 | 366 | | H0658: 2 | | |
| HPDPQ40 | 922464 | 129 | 2-223 | 367 | Ile-10 to Asn-36. | L0520: 2, L0770: 2, | | |
| | | | | | | H0658: 2, L0659:1 | | |
| | | | | | | and L0759: 1 | | |
| HPDQO05 | 929274 | 130 | 588-875 | 368 | Ala-13 to His-22, | L0749: 3, H0658: 2 | | |
| | | | | | Leu-80 to Arg-86. | and H0660: 1. | | |
| HPDRD28 | 957791 | 131 | 308-511 | 369 | | H0658: 2 | | |
| HPDRG92 | 967704 | 132 | 1-291 | 370 | Pro-51 to Phe-57, | L0748: 3, H0658:2 | | |
| | | | | | Ser-87 to Thr-94. | and L0741: 1. | | |
| HPDRO20 | 957678 | 133 | 2-163 | 371 | | L0021: 1, H0658: 1 | | |
| | | | | | | and H0672: 1. | | |
| HPDVE05 | 928647 | 134 | 430-765 | 372 | Pro-22 to Asn-33, | L0512: 5, L0513: 4, | | |
| | | | | | Arg-103 to Val-108. H0686: 3, L0509:3, | | | |
| | | | | | L0789: 3, L0761: 2, | | | |
| | | | | | L0772: 2, L0764: 2, | | | |
| | | | | | L0717: 1, L0800: 1, | | | |
| | | | | | L0378: 1, L0776: 1, | | | |
| | | | | | L0659: 1, H0658: 1 | | | |
| | | | | | and L0747: 1. | | | |
| HPDVK12 | 968977 | 135 | 97-243 | 373 | | L0374: 1, L0804: 1, | | |
| | | | | | | L0805: 1, H0658: 1, | | |
| | | | | | | H0648: 1, L0750: 1 | | |
| | | | | | | and L0755: 1. | | |
| HPDVY17 | 955902 | 136 | 226-444 | 374 | Gln-1 to Thr-6, | H0658: 2 | | |
| | | | | | Ser-22 to Leu-27, | | | |
| | | | | | Ser-32 to Phe-37. | | | |
| HVCAZ38 | 969208 | 137 | 3-206 | 375 | Ala-47 to Phe-55. | H0666: 339, H0660:3, | | |
| | | | | | | L0751:2, H0676: 1, | | |
| | | | | | | H0560: 1 and | | |
| | | | | | | H0520: 1. | | |
| HVCBV04 | 925844 | 138 | 519-632 | 376 | His-1 to Ser-6. | H0666: 5 | | |
| HVCCC81 | 933449 | 139 | 3-62 | 377 | | H0666: 2 | | |
| HVCCK04 | 925796 | 140 | 3-560 | 378 | Arg-8 to Gly-19, | H0666: 222, L0776: 5, | | |
| | | | | | Pro-22 to Cys-29, | L0749: 3, S0358: 2, | | |
| | | | | | Asp-54 to Cys-65, | L0763: 2, L0766: 2, | | |
| | | | | | Ser-68 to Ala-77, | L0439: 2, L0596: 2, | | |
| | | | | | Glu-97 to Ser-103, | H0650: 1, H0341: 1, | | |
| | | | | | Pro-171 to Leu-176. | S0442: 1, H0009: 1, | | |
| | | | | | | H0178: 1, H0012: 1, | | |
| | | | | | | H0087: 1, S0150: 1, | | |
| | | | | | | L0805: 1, L0655: 1, | | |
| | | | | | | L0657: 1, L0659: 1, | | |
| | | | | | | L0783: 1, L0809: 1 | | |
| | | | | | | L0789: 1, L0663: 1, | | |
| | | | | | | L0374: 1, L0602: 1 | | |
| | | | | | | L0731: 1 and | | |
| | | | | | | L0758: 1. | | |
| HVVAC41 | 949141 | 141 | 85-273 | 379 | | H0672: 2 | | |
| HVVAJ06 | 933675 | 142 | 1-240 | 380 | | H0672: 2 | | |
| HVVBG19 | 968967 | 143 | 1-171 | 381 | | H0672: 2 | | |
| HVVBK45 | 964102 | 144 | 710-480 | 382 | Cys-14 to Tyr-21. | L0666: 3 and | | |
| | | | | | | H0672: 2 | | |
| HVVBV44 | 917559 | 145 | 3-104 | 383 | | H0672: 2 | | |
| HVVCO01 | 913996 | 146 | 67-294 | 384 | Lys-12 to Trp-18, | H0672: 2 | | |
| | | | | | Phe-35 to Thr-42. | | | |
| HVVDT04 | 925793 | 147 | 137-3 | 385 | | L0766: 1 and | | |
| | | | | | | H0672: 1. | | |
| HVVBY08 | 957658 | 148 | 2-406 | 386 | | AR089: 14, AR061: 6 | | |
| | | | | | | H0672: 1 | | |
| HVVBM06 | 933528 | 149 | 288-443 | 387 | Pro-33 to Gly-38, | L0731: 2, L0635: 1, | | |
| | | | | | Leu-45 to Thr-51. | L0663: 1, H0672: 1 | | |
| | | | | | | and L0777: 1. | | |
| HPDWR11 | 965249 | 150 | 261-548 | 388 | Gly-1 to Thr-13, | L0759: 2, L0769: 1, | | |
| | | | | | Arg-37 to Ser-45, | L0768: 1, L0794: 1, | | |
| | | | | | Arg-52 to Asn-73. | L0805: 1, H0658: 1, | | |
| | | | | | | L0750: 1 and | | |
| | | | | | | L0777: 1. | | |
| HPDWN05 | 928563 | 151 | 287-472 | 389 | | L0439: 2, L0717: 1, | | |
| | | | | | | L0803: 1, H0658: 1 | | |
| | | | | | | and L0777: 1. | | |
| HPDVM01 | 913859 | 152 | 311-433 | 390 | | L0779: 2 and | | |
| | | | | | | H0658: 1. | | |
| HPDVD11 | 965276 | 153 | 25-117 | 391 | Ala-10 to Lys-18. | H0658: 1 and | | |
| | | | | | | L0779: 1. | | |
| HPDRU11 | 965307 | 154 | 118-342 | 392 | Gly-13 to Trp-21. | H0658: 1 and | | |
| | | | | | | L0756: 1. | | |
| HPDRR06 | 968601 | 155 | 448-74 | 393 | Pro-65 to His-76, | L0666: 2, L0766: 1, | | |
| | | | | | Asn-110 to Phe-118. | L0655: 1 and | | |
| | | | | | | H0658: 1. | | |
| HPDRN07 | 951838 | 156 | 54-299 | 394 | Asp-11 to Asn-17. | H0658: 1 and | | |
| | | | | | | L0604: 1. | | |
| HPDRG01 | 914416 | 157 | 339-674 | 395 | | L0748: 2, H0658: 1 | | |
| | | | | | | and L0750: 1. | | |
| HPDPS12 | 969342 | 158 | 1-255 | 396 | Arg-10 to Gln-16, | H0658: 1, L0777: 1 | | |
| | | | | | Pro-24 to Gly-30. | and L0592: 1. | | |
| HPDPP12 | 969341 | 159 | 3-179 | 397 | Thr-1 to Asn-13, | L0523: 1 and | | |
| | | | | | Pro-35 to Lys-42. | H0658: 1. | | |
| HPDPC08 | 957822 | 160 | 120-398 | 398 | Arg-23 to Val-29. | H0658: 1 | 13 | |
| HPDOW10 | 961782 | 161 | 280-429 | 399 | Met-6 to His-12. | L0766: 2, L0776: 2, | | |
| | | | | | | H0658: 1 and | | |
| | | | | | | L0779: 1. | | |
| HPDOO10 | 961881 | 162 | 338-520 | 400 | | L0767: 3 and | | |
| | | | | | | H0658: 1. | | |
| HPDOF11 | 965491 | 163 | 30-227 | 401 | | L0770: 2 and | | |
| | | | | | | H0658: 1. | | |
| HPCTK02 | 917480 | 164 | 207-446 | 402 | | H0659: 1, L0740: 1 | | |
| | | | | | | and L0756: 1. | | |
| HPCTD03 | 922149 | 165 | 3-332 | 403 | | AR089: 6, AR061: 2 | | |
| | | | | | | H0659: 1 | | |
| HPCTC04 | 925777 | 166 | 150-347 | 404 | Arg-40 to Gln-47. | L0659: 2, H0659: 1 | | |
| | | | | | | and L0779: 1. | | |
| HPCQQ07 | 951646 | 167 | 2-328 | 405 | Arg-6 to Arg-11. | L0805: 1, L0776: 1 | | |
| | | | | | | and H0659: 1. | | |
| HPCPM63 | 954940 | 168 | 85-222 | 406 | | L0800: 1, H0659: 1 | | |
| | | | | | | and L0747: 1. | | |
| HPCOV68 | 911075 | 169 | 97-249 | 407 | | AR089: 23, AR061: 7 | | |
| | | | | | | L0439: 2, L0369: 1 | | |
| | | | | | | and H0659: 1 | | |
| HOPJG10 | 961501 | 170 | 51-350 | 408 | Pro-11 to Cys-21, | L0794: 2, L0352: 1 | | |
| | | | | | Lys-30 to Asp-36. | H0684: 1, L0777: 1 | | |
| | | | | | | and L0589: 1. | | |
| HOOKF10 | 961499 | 171 | 210-359 | 409 | Lys-38 to Lys-50. | L0776: 1 and | | |
| | | | | | | H0648: 1. | | |
| HOOKF04 | 925784 | 172 | 508-239 | 410 | Thr-31 to Lys-40. | L0758: 3, L0779: 2 | | |
| | | | | | | H0648: 1 and | | |
| | | | | | | L0740: 1. | | |
| HOOJU04 | 925774 | 173 | 17-283 | 411 | | H0648: 1 and | | |
| | | | | | | L0777: 1. | | |
| HOOJN04 | 925783 | 174 | 3-260 | 412 | Arg-21 to Leu-27. | L0770: 1, L0794: 1, | | |
| | | | | | | L0804: 1 and H0648: 1. | | |
| HOOJK11 | 965292 | 175 | 205-420 | 413 | Pro-48 to Phe-72. | H0648: 1 and | | |
| | | | | | | L0750: 1. | | |
| HOOJH05 | 928627 | 176 | 37-210 | 414 | Val-16 to Thr-26, | L0758: 3 and | | |
| | | | | | Pro-30 to Ser-36, | H0648: 1. | | |
| | | | | | Pro-53 to Glu-58. | | | |
| HOOJE02 | 917454 | 177 | 248-379 | 415 | Lys-34 to Gly-41. | H0648: 1 and | | |
| | | | | | | L0758: 1. | | |
| HOOIL05 | 928644 | 178 | 280-444 | 416 | Pro-42 to Asp-55. | L0751: 3, L0764: 1, | | |
| | | | | | | L0518: 1, H0648: 1, | | |
| | | | | | | L0747: 1 and | | |
| | | | | | | L0752: 1. | | |
| HOOIG03 | 922510 | 179 | 2-205 | 417 | Glu-34 to Glu-44. | H0648: 1 and | | |
| | | | | | | L0596: 1. | | |
| HOOHP02 | 917424 | 180 | 210-374 | 418 | Phe-13 to Gln-24. | H0648: 1, L0748: 1, | | |
| | | | | | | L0751: 1, L0754: 1 | | |
| | | | | | | and L0749: 1. | | |
| HOOHE67 | 969061 | 181 | 1-171 | 419 | | H0648: 1, L0754: 1 | | |
| | | | | | | and L0750: 1. | | |
| HOOHD06 | 933873 | 182 | 1-150 | 420 | Arg-1 to Cys-10, | L0666: 1 and | | |
| | | | | | Lys-17 to Gly-24. | H0648: 1. | | |
| HODKG07 | 951875 | 183 | 3-143 | 421 | Gly-13 to Ser-20, | L0623: 2, H0615: 1 | | |
| | | | | | Arg-41 to Thr-47. | and L0519: 1. | | |
| HODJU05 | 929321 | 184 | 91-309 | 422 | Arg-52 to Asn-61. | H0615: 1, L0435: 1 | | |
| | | | | | | and L0759: 1. | | |
| HODJL04 | 926200 | 185 | 128-328 | 423 | | H0615: 1, L0520: 1 | | |
| | | | | | | and L0766: 1. | | |
| HODHK07 | 952193 | 186 | 114-278 | 424 | Thr-26 to Ser-33. | H0615: 1 and | | |
| | | | | | | L0754: 1. | | |
| HODHG11 | 966063 | 187 | 338-610 | 425 | Arg-1 to Val-10, | H0615: 1 and | | |
| | | | | | Trp-12 to Tyr-20, | L0758: 1. | | |
| | | | | | Arg-47 to Ser-63. | | | |
| HODGL88 | 859300 | 188 | 461-610 | 426 | Arg-8 to Arg-16. | L0471: 1, H0615: 1, | | |
| | | | | | | L0748: 1 and | | |
| | | | | | | L0749: 1. | | |
| HODGJ02 | 918476 | 189 | 237-368 | 427 | | L0471: 1, H0615: 1 | | |
| | | | | | | and L0747: 1. | | |
| HODFY10 | 963350 | 190 | 122-358 | 428 | Asn-1 to Asp-6, | L0777: 2 and | | |
| | | | | | Phe-8 to Ser-14. | H0615: 1. | | |
| HODFX19 | 842138 | 191 | 3-494 | 429 | Pro-15 to Gly-24, | H0615: 1 and | | |
| | | | | | Cys-36 to Ile-44, | L0775: 1. | | |
| | | | | | Arg-77 to Pro-112. | | | |
| HODFX12 | 969588 | 192 | 3-170 | 430 | Ser-17 to Gln-29. | H0615: 1 and | | |
| | | | | | | L0666: 1. | | |
| HODFX04 | 926278 | 193 | 222-491 | 431 | Ser-2 to Ile-16. | H0615: 1, L0775: 1 | | |
| | | | | | | and L0748: 1. | | |
| HODFW95 | 795281 | 194 | 3-563 | 432 | His-1 to Arg-7, | L0747: 2 and | | |
| | | | | | Ala-45 to Arg-52, | H0615: 1. | | |
| | | | | | Ser-75 to Leu-80, | | | |
| | | | | | Arg-89 to Asp-94, | | | |
| | | | | | Arg-139 to Glu-158. | | | |
| HODFW40 | 859320 | 195 | 386-556 | 433 | | H0615: 1, L0805: 1 | | |
| | | | | | | and L0776: 1. | | |
| HODFR85 | 783789 | 196 | 35-199 | 434 | | H0615: 1 and | | |
| | | | | | | L0756: 1. | | |
| HODFL37 | 948703 | 197 | 239-463 | 435 | Lys-1 to Thr-22. | H0615: 1 | | |
| HODFJ11 | 966065 | 198 | 326-460 | 436 | | L0777: 2 and | | |
| | | | | | | H0615: 1. | | |
| HODFI66 | 974317 | 199 | 81-338 | 437 | | H0615: 1 | | |
| HODFH45 | 974916 | 200 | 453-593 | 438 | | H0615: 1 | | |
| HODFG82 | 779191 | 201 | 1-150 | 439 | | H0615: 1 and | | |
| | | | | | | L0362: 1. | | |
| HODFF88 | 974911 | 202 | 14-544 | 440 | His-8 to Gly-18, | AR054: 34, AR051: 29 | | |
| | | | | | Glu-150 to Leu-167. | AR050: 23, AR089: 4, | | |
| | | | | | | AR061: 4 | | |
| | | | | | | H0615: 1 | | |
| HODFE04 | 926999 | 203 | 85-249 | 441 | | H0615: 1 and | | |
| | | | | | | L0748: 1. | | |
| HODFD73 | 909812 | 204 | 1-576 | 442 | | AR061: 10, AR089: 4 | | |
| | | | | | | H0615: 1 | | |
| HODFC79 | 774156 | 205 | 66-242 | 443 | Thr-47 to Lys-53. | H0615: 1 and | | |
| | | | | | | L0749: 1. | | |
| HODEZ45 | 974337 | 206 | 215-436 | 444 | His-34 to Trp-39. | H0615: 1 | | |
| HODEU01 | 915167 | 207 | 2-286 | 445 | | L0748: 3 and | | |
| | | | | | | H0615: 1. | | |
| HODET07 | 952194 | 208 | 354-127 | 446 | | H0615: 1 and | | |
| | | | | | | L0748: 1. | | |
| HODES10 | 963474 | 209 | 90-200 | 447 | | L0534: 1 and | | |
| | | | | | | H0615: 1. | | |
| HODEO35 | 859364 | 210 | 2-136 | 448 | | H0615: 1, L0376: 1 | | |
| | | | | | | and L0759: 1. | | |
| HODEK82 | 779245 | 211 | 420-596 | 449 | Leu-1 to Phe-8. | H0615: 1 and | | |
| | | | | | | L0753: 1. | | |
| HODEI81 | 909027 | 212 | 258-428 | 450 | Gly-8 to Leu-13, | AR061: 7, AR089: 7 | | |
| | | | | | Gly-27 to Glu-39. | N0006: 1 and | | |
| | | | | | | H0615: 1. | | |
| HODEA14 | 859375 | 213 | 3-527 | 451 | | H0615: 1, L0060: 1 | | |
| | | | | | | and L0462: 1. | | |
| HOCPU05 | 928651 | 214 | 114-377 | 452 | | L0755:2, L0758: 2 | | |
| | | | | | | L0717: 1, L0365: 1 | | |
| | | | | | | and H0660: 1. | | |
| HOCPH02 | 917453 | 215 | 139-327 | 453 | Arg-14 to Cys-20, | L0748: 2, L0756: 2, | | |
| | | | | | Val-34 to Cys-43, | L0372: 1, L0663: 1, | | |
| | | | | | Pro-45 to Ser-52. | L0665: 1, H0660: 1, | | |
| | | | | | | L0439: 1 and L0777: 1. | | |
| HOCPF02 | 917630 | 216 | 49-240 | 454 | Ser-18 to Ser-27. | L0766: 1, H0660: 1 | | |
| | | | | | | and L0758: 1. | | |
| HOCOV07 | 951744 | 217 | 108-314 | 455 | Phe-19 to Tyr-34, | L0766: 3 and | | |
| | | | | | Ser-41 to Arg-51. | H0660: 1. | | |
| HOCMM01 | 914464 | 218 | 112-390 | 456 | Ser-19 to Tyr-28, | L0763: 1, L0776: 1 | | |
| | | | | | Glu-34 to Val-45, | and H0660: 1. | | |
| | | | | | Gly-53 to Pro-58, | | | |
| | | | | | Glu-63 to Gln-82. | | | |
| HOCMI24 | 878363 | 219 | 2-484 | 457 | Asp-21 to Leu-45. | H0660: 1 and | | |
| | | | | | | L0731: 1. | | |
| HOCMC01 | 914552 | 220 | 432-136 | 458 | Pro-31 to Gly-36, | H0660: 1 and | | |
| | | | | | Ser-60 to Leu-65, | L0749: 1. | | |
| | | | | | Gln-69 to Thr-76, | | | |
| | | | | | Gly-81 to Glu-87. | | | |
| HKZAH11 | 965175 | 221 | 1-324 | 459 | Gly-11 to Ile-17, | L0794: 2, L0766: 1, | | |
| | | | | | Asn-24 to Ser-31, | L0665: 1 and | | |
| | | | | | Gln-47 to Ala-64, | H0689: 1. | | |
| | | | | | Pro-66 to Ala-72, | | | |
| | | | | | Gly-77 to Gly-84. | | | |
| HCORB05 | 928679 | 222 | 2-142 | 460 | Pro-1 to Arg-14. | L0626: 1, L0775: 1, | | |
| | | | | | | L0776: 1 and H0670: 1. | | |
| HCOPM06 | 933473 | 223 | 158-628 | 461 | Pro-15 to Glu-21, | L0769: 1, L0665: 1 | | |
| | | | | | Ala-43 to Glu-58, | and H0670: 1. | | |
| | | | | | Leu-96 to Glu-101, | | | |
| | | | | | Ala-111 to Ala-119. | | | |
| HCOPI07 | 951645 | 224 | 185-313 | 462 | Thr-29 to Arg-43. | H0670: 1 and | | |
| | | | | | | L0758: 1. | | |
| HCOPF07 | 951655 | 225 | 79-240 | 463 | | L0779: 3, L0758: 3 | | |
| | | | | | | and H0670: 1. | | |
| HCOOF07 | 951693 | 226 | 221-493 | 464 | Pro-13 to Ser-19, | H0670: 1, L0731: 1 | | |
| | | | | | Asp-27 to Thr-35. | and L0759: 1 | | |
| HCONP02 | 917577 | 227 | 148-306 | 465 | Asn-7 to Val-13. | L0517: 1, L0438: 1, | | |
| | | | | | | H0670: 1 and L0439: 1. | | |
| HCONM33 | 971637 | 228 | 474-217 | 466 | Asp-5 to Ala-11, | L0517: 2, L0756: 2, | | |
| | | | | | Trp-24 to Phe-31, | L0803: 1, L0776: 1, | | |
| | | | | | Arg-44 to Trp-50. | L0809: 1, L0663: 1 | | |
| | | | | | | H0670: 1, L0755: 1 | | |
| | | | | | | and L0759: 1. | | |
| HCOMM05 | 925952 | 229 | 1-840 | 467 | Gln-19 to Asp-38, | AR089: 1, AR061: 1 | | |
| | | | | | Pro-46 to Thr-55, | H0670: 1 | | |
| | | | | | Leu-96 to Gly-104, | | | |
| | | | | | Ala-114 to Ala-119, | | | |
| | | | | | Gln-125 to Trp-131, | | | |
| | | | | | Pro-133 to Pro-141, | | | |
| | | | | | Phe-144 to Glu-150, | | | |
| | | | | | Glu-180 to Val-185, | | | |
| | | | | | Glu-192 to Glu-197, | | | |
| | | | | | Glu-254 to Leu-262, | | | |
| | | | | | Met-272 to Ser-280. | | | |
| HCBND03 | 922388 | 230 | 3-401 | 468 | Pro-12 to Thr-21, | H0661: 1, L0805: 1 | | |
| | | | | | Gly-35 to Thr-41, | and L0776: 1. | | |
| | | | | | Thr-53 to Gln-75, | | | |
| | | | | | Ser-92 to Gly-98. | | | |
| HCBMZ07 | 951788 | 231 | 230-358 | 469 | | H0661: 1 and | | |
| | | | | | | L0740: 1. | | |
| HCBMY10 | 961718 | 232 | 371-138 | 470 | Glu-22 to Glu-49. | H0661: 1 and | | |
| | | | | | | L0603: 1. | | |
| HCBMG11 | 965394 | 233 | 207-653 | 471 | Ala-1 to Asn-9, | H0661: 1, L0664: 1, | | |
| | | | | | Thr-24 to Asn-29, | L0754: 1 and | | |
| | | | | | Gly-43 to Arg-53, | L0749: 1. | | |
| | | | | | Arg-106 to Arg-111. | | | |
| HBGDH33 | 702854 | 234 | 3-374 | 472 | | L0439: 6, L0776: 2, | | |
| | | | | | | L0777: 2, H0181: 1, | | |
| | | | | | | L0762: 1 and | | |
| | | | | | | L0809: 1. | | |
| HBGDF39 | 861602 | 235 | 2-355 | 473 | Leu-92 to Phe-98. | AR089: 0, AR061: 0 | | |
| | | | | | | H0181: 1 | | |
| HBGDA74 | 832888 | 236 | 2-277 | 474 | | AR089: 33, AR061: 29 | 11q13 | 102200, |
| | | | | | | H0181: 1 | | 106100, |
| | | | | | | | | 131100, |
| | | | | | | | | 131100, |
| | | | | | | | | 131100, |
| | | | | | | | | 133780, |
| | | | | | | | | 147050, |
| | | | | | | | | 153700, |
| | | | | | | | | 161015, |
| | | | | | | | | 164009, |
| | | | | | | | | 168461, |
| | | | | | | | | 168461, |
| | | | | | | | | 168461, |
| | | | | | | | | 180721, |
| | | | | | | | | 180840, |
| | | | | | | | | 191181, |
| | | | | | | | | 193235, |
| | | | | | | | | 209901, |
| | | | | | | | | 232600, |
| | | | | | | | | 259700, |
| | | | | | | | | 259770, |
| | | | | | | | | 600045, |
| | | | | | | | | 600319, |
| | | | | | | | | 600528, |
| | | | | | | | | 601884 |
| HBGBG69 | 802090 | 237 | 1-57 | 475 | Lys-8 to Ala-14. | H0181: 1 | | |
| HBGBG67 | 588263 | 238 | 2-157 | 476 | | H0181: 1 | | |
| HBGBG52 | 522424 | 239 | 120-257 | 477 | Leu-8 to Gly-19, | H0181: 1 | | |
| | | | | | Leu-31 to Cys-36. | | | |
| HBGBG38 | 525837 | 240 | 1-150 | 478 | Ser-1 to Glu-10. | H0181: 1 | | |
| HBGBE12 | 971466 | 241 | 1-69 | 479 | | H0181: 1 | | |
| HBGBB78 | 773930 | 242 | 1-342 | 480 | Ser-11 to Trp-17, | H0181: 1 and | | |
| | | | | | Pro-19 to Thr-28. | L0741: 1. | | |
| HBCPV80 | 932817 | 243 | 2-403 | 481 | Arg-1 to Arg-8, | AR061: 1, AR089: 1 | | |
| | | | | | Glu-29 to Arg-37. | H0663: 1 and | | |
| | | | | | | L0783: 1. | | |
| HBCPO75 | 927520 | 244 | 135-356 | 482 | Ala-26 to Val-32. | L0779: 3, H0663: 1, | | |
| | | | | | | L0757: 1 and | | |
| | | | | | | L0758: 1. | | |
| HBCPK03 | 922493 | 245 | 194-514 | 483 | Lys-25 to Asn-34, | H0663: 1 and | | |
| | | | | | Thr-92 to Gly-98. | L0766: 1. | | |
| HBCJP02 | 917981 | 246 | 349-507 | 484 | Glu-14 to Ala-30, | H0664: 1 and | | |
| | | | | | Ile-46 to Lys-53. | L0758: 1. | | |
| HBCJG07 | 951898 | 247 | 3-137 | 485 | Arg-5 to Ser-15. | L0754: 2, H0664: 1 | | |
| | | | | | | and L0748: 1. | | |
| HACMR08 | 955638 | 248 | 2-280 | 486 | Leu-30 to Lys-38, | L0809: 2, H0685: 1, | | |
| | | | | | Trp-49 to Ala-58, | L0776: 1 and | | |
| | | | | | Gly-75 to Pro-80. | L0780: 1. | | |

[0044] The first column in Table 1A provides a unique “Clone ID NO:Z” for a cDNA clone related to each contig sequence disclosed in Table 1A. This clone ID references the cDNA clone which contains at least the 5′ most sequence of the assembled contig, and at least a portion of SEQ ID NO:X was determined by directly sequencing the referenced clone. The reference clone may have more sequence than described in the sequence listing or the clone may have less. In the vast majority of cases, however, the clone is believed to encode a full-length polypeptide. In the case where a clone is not full-length, a full-length cDNA can be obtained by methods known in the art and/or as described elsewhere herein.

[0045] The second column in Table 1A provides a unique “Contig ID” identification for each contig sequence. The third column provides the “SEQ ID NO:X” identifier for each of the ovarian and/or breast cancer associated contig polynucleotide sequences disclosed in Table 1A. The fourth column, “ORF (From-To)”, provides the location (i.e., nucleotide position numbers) within the polynucleotide sequence “SEQ ID NO:X” that delineate the preferred open reading frame (ORF) shown in the sequence listing and referenced in Table 1A, column 5, as SEQ ID NO:Y. Where the nucleotide position number “To” is lower than the nucleotide position number “From”, the preferred ORF is the reverse complement of the referenced polynucleotide sequence.

[0046] The fifth column in Table 1A provides the corresponding SEQ ID NO:Y for the polypeptide sequence encoded by the preferred ORF delineated in column 4. In one embodiment, the invention provides an amino acid sequence comprising, or alternatively consisting of, a polypeptide encoded by the portion of SEQ ID NO:X delineated by “ORF (From-To)”. Also provided are polynucleotides encoding such amino acid sequences and the complementary strand thereto.

[0047] Column 6 in Table 1A lists residues comprising epitopes contained in the polypeptides encoded by the preferred ORF (SEQ ID NO:Y), as predicted using the algorithm of Jameson and Wolf, (1988) Comp. Appl. Biosci. 4:181-186. The Jameson-Wolf antigenic analysis was performed using the computer program PROTEAN (Version 3.11 for the Power MacIntosh, DNASTAR, Inc., 1228 South Park Street Madison, Wis.). In specific embodiments, polypeptides of the invention comprise, or alternatively consist of, at least one, two, three, four, five or more of the predicted epitopes as described in Table 1A. It will be appreciated that depending on the analytical criteria used to predict antigenic determinants, the exact address of the determinant may vary slightly.

[0048] Column 7 in Table 1A provides an expression profile and library code: count for each of the contig sequences (SEQ ID NO:X) disclosed in Table 1A, which can routinely be combined with the information provided in Table 4 and used to determine the normal or diseased tissues, cells, and/or cell line libraries which predominantly express the polynucleotides of the invention. The first number in column 7 (preceding the colon), represents the tissue/cell source identifier code corresponding to the code and description provided in Table 4. For those identifier codes in which the first two letters are not “AR”, the second number in column 7 (following the colon) represents the number of times a sequence corresponding to the reference polynucleotide sequence was identified in the tissue/cell source. Those tissue/cell source identifier codes in which the first two letters are “AR” designate information generated using DNA array technology. Utilizing this technology, cDNAs were amplified by PCR and then transferred, in duplicate, onto the array. Gene expression was assayed through hybridization of first strand cDNA probes to the DNA array. cDNA probes were generated from total RNA extracted from a variety of different tissues and cell lines. Probe synthesis was performed in the presence of ³³P dCTP, using oligo(dT) to prime reverse transcription. After hybridization, high stringency washing conditions were employed to remove non-specific hybrids from the array. The remaining signal, emanating from each gene target, was measured using a Phosphorimager. Gene expression was reported as Phosphor Stimulating Luminescence (PSL) which reflects the level of phosphor signal generated from the probe hybridized to each of the gene targets represented on the array. A local background signal subtraction was performed before the total signal generated from each array was used to normalize gene expression between the different hybridizations. The value presented after “[array code]:” represents the mean of the duplicate values, following background subtraction and probe normalization. One of skill in the art could routinely use this information to identify normal and/or diseased tissue(s) which show a predominant expression pattern of the corresponding polynucleotide of the invention or to identify polynucleotides which show predominant and/or specific tissue and/or cell expression. The sequences disclosed herein have been determined to be predominantly expressed in ovarian and/or breast tissues, including normal and diseased ovarian and/or breast tissues (See Table 1A, column 7 and Table 4).

[0049] Column 8 in Table 1A provides a chromosomal map location for certain polynucleotides of the invention. Chromosomal location was determined by finding exact matches to EST and cDNA sequences contained in the NCBI (National Center for Biotechnology Information) UniGene database. Each sequence in the UniGene database is assigned to a “cluster”; all of the ESTs, cDNAs, and STSs in a cluster are believed to be derived from a single gene. Chromosomal mapping data is often available for one or more sequence(s) in a UniGene cluster; this data (if consistent) is then applied to the cluster as a whole. Thus, it is possible to infer the chromosomal location of a new polynucleotide sequence by determining its identity with a mapped UniGene cluster.

[0050] A modified version of the computer program BLASTN (Altshul et al., J. Mol. Biol. 215:403-410 (1990), and Gish et al., Nat. Genet. 3:266-272 (1993)) was used to search the UniGene database for EST or cDNA sequences that contain exact or near-exact matches to a polynucleotide sequence of the invention (the ‘Query’). A sequence from the UniGene database (the ‘Subject’) was said to be an exact match if it contained a segment of 50 nucleotides in length such that 48 of those nucleotides were in the same order as found in the Query sequence. If all of the matches that met this criteria were in the same UniGene cluster, and mapping data was available for this cluster, it is indicated in Table 1A under the heading “Cytologic Band”. Where a cluster had been further localized to a distinct cytologic band, that band is disclosed; where no banding information was available, but the gene had been localized to a single chromosome, the chromosome is disclosed.

[0051] Once a presumptive chromosomal location was determined for a polynucleotide of the invention, an associated disease locus was identified by comparison with a database of diseases which have been experimentally associated with genetic loci. The database used was the Morbid Map, derived from OMIM™ (supra). If the putative chromosomal location of a polynucleotide of the invention (Query sequence) was associated with a disease in the Morbid Map database, an OMIM reference identification number was noted in column 9, Table 1A, labeled “OMIM Disease Reference(s)”. Table 5 is a key to the OMIM reference identification numbers (column 1), and provides a description of the associated disease in Column 2.

TABLE 1B

| Clone ID | SEQ ID | CONTIG | BAC ID: | SEQ ID | EXON |
|---|---|---|---|---|---|
| NO:Z | NO:X | ID: | A | NO:B | From-To |
| HBGBS07 | 15 | 954299 | AL358472 | 487 | 1-93 |
| | | | | | 229-341 |
| | | | | | 458-525 |
| | | | | | 639-725 |
| | | | | | 820-2416 |
| | | | | | 3085-3172 |
| | | | | | 3955-5506 |
| | | | | | 5626-6422 |
| HBGBS07 | 15 | 954299 | AL358472 | 488 | 1-391 |
| HBGBS07 | 15 | 954299 | AL358472 | 489 | 1-344 |
| | | | | | 399-469 |
| HBGDE85 | 18 | 524875 | AC020850 | 490 | 1-912 |
| | | | | | 1276-1413 |
| HBGDE85 | 18 | 524875 | AC008693 | 491 | 1-138 |
| HBGDE85 | 18 | 524875 | AC023611 | 492 | 1-105 |
| HBGDE85 | 18 | 524875 | AC022123 | 493 | 1-957 |
| | | | | | 1332-1469 |
| HBGDE85 | 18 | 524875 | AC010845 | 494 | 1-138 |
| HBGDT43 | 19 | 974223 | L81574 | 495 | 1-168 |
| HBGDT43 | 19 | 974223 | AC022276 | 496 | 1-166 |
| HBGDT43 | 19 | 974223 | AC023653 | 497 | 1-57 |
| HBGDT43 | 19 | 974223 | AC012102 | 498 | 1-140 |
| HBGDT43 | 19 | 974223 | AC048382 | 499 | 1-115 |
| HBGDT43 | 19 | 974223 | AC011036 | 500 | 1-193 |
| HBGDT43 | 19 | 974223 | AC068682 | 501 | 1-153 |
| HBGDT43 | 19 | 974223 | AL356496 | 502 | 1-35 |
| HBGDT43 | 19 | 974223 | AC006087 | 503 | 1-129 |
| HBGDT43 | 19 | 974223 | AC016142 | 504 | 1-150 |
| HBGDT43 | 19 | 974223 | AC027456 | 505 | 1-98 |
| HBGDT43 | 19 | 974223 | AC016797 | 506 | 1-116 |
| HBGDT43 | 19 | 974223 | AL356606 | 507 | 1-87 |
| HBGDT43 | 19 | 974223 | AC025181 | 508 | 1-159 |
| HBGDT43 | 19 | 974223 | AC055788 | 509 | 1-170 |
| HBGDT43 | 19 | 974223 | AC027264 | 510 | 1-147 |
| HBGDT43 | 19 | 974223 | AC026537 | 511 | 1-132 |
| HBGDT43 | 19 | 974223 | AC000360 | 512 | 1-142 |
| HBGDT43 | 19 | 974223 | AC023583 | 513 | 1-153 |
| HBGDT43 | 19 | 974223 | AL161613 | 514 | 1-63 |
| HBGDT43 | 19 | 974223 | AC062010 | 515 | 1-155 |
| HBGDT43 | 19 | 974223 | AC004803 | 516 | 1-154 |
| HBGDT43 | 19 | 974223 | AC023583 | 517 | 1-59 |
| | | | | | 1391-1548 |
| HBGDT43 | 19 | 974223 | AL161613 | 518 | 1-129 |
| HBGDT43 | 19 | 974223 | L81574 | 519 | 1-315 |
| | | | | | 1979-2215 |
| | | | | | 2720-3771 |
| HBGDT43 | 19 | 974223 | AL356496 | 520 | 1-131 |
| HCBNW02 | 20 | 950897 | AF205589 | 521 | 1-32 |
| | | | | | 110-254 |
| | | | | | 333-849 |
| | | | | | 918-999 |
| | | | | | 1069-1147 |
| | | | | | 1231-1322 |
| | | | | | 1435-1687 |
| | | | | | 1765-1881 |
| | | | | | 1958-2357 |
| | | | | | 2441-3044 |
| | | | | | 3104-3153 |
| | | | | | 3226-3549 |
| | | | | | 3626-3791 |
| | | | | | 3874-4018 |
| | | | | | 4089-4184 |
| | | | | | 4258-4377 |
| | | | | | 4424-5493 |
| | | | | | 5591-5736 |
| | | | | | 5834-5922 |
| | | | | | 6196-6415 |
| | | | | | 6479-6654 |
| | | | | | 6735-6895 |
| | | | | | 7030-7124 |
| | | | | | 7229-7371 |
| | | | | | 7452-7567 |
| | | | | | 7707-7796 |
| | | | | | 7887-7969 |
| | | | | | 8059-8133 |
| | | | | | 8149-8306 |
| | | | | | 8381-8736 |
| HCOOG04 | 23 | 925748 | AC012589 | 522 | 1-524 |
| HCOOG04 | 23 | 925748 | AC012589 | 523 | 1-2408 |
| | | | | | 3890-4040 |
| | | | | | 4216-4268 |
| | | | | | 7091-7175 |
| HCOOI07 | 24 | 951665 | AC074191 | 524 | 1-710 |
| HCOOI07 | 24 | 951665 | AC022240 | 525 | 1-710 |
| HCOOM77 | 25 | 969161 | AC025572 | 526 | 1-516 |
| HCOQE11 | 26 | 965299 | AL132777 | 527 | 1-788 |
| | | | | | 884-2272 |
| HCOQE11 | 26 | 965299 | AL132777 | 528 | 1-312 |
| HCOCQ07 | 28 | 951658 | AC013267 | 529 | 1-734 |
| | | | | | 831-1524 |
| HCOCQ07 | 28 | 951658 | AC013267 | 530 | 1-103 |
| HCOCQ07 | 28 | 951658 | AC013267 | 531 | 1-620 |
| HOCPJ03 | 30 | 917484 | AC036229 | 532 | 1-440 |
| | | | | | 602-656 |
| | | | | | 1173-1559 |
| | | | | | 1846-2263 |
| | | | | | 2281-2450 |
| | | | | | 2778-3266 |
| HOCPJ03 | 30 | 917484 | AC036229 | 533 | 1-779 |
| HOCQA47 | 31 | 954934 | AC010310 | 534 | 1-846 |
| HOCQA47 | 31 | 954934 | AC008990 | 535 | 1-579 |
| | | | | | 1410-1855 |
| | | | | | 2046-4238 |
| | | | | | 4245-4589 |
| | | | | | 4723-5500 |
| | | | | | 5796-6198 |
| HOCQA47 | 31 | 954934 | AC010620 | 536 | 1-834 |
| | | | | | 1126-1489 |
| | | | | | 1779-2082 |
| | | | | | 2087-2615 |
| | | | | | 2924-3005 |
| | | | | | 3288-3484 |
| | | | | | 6156-6584 |
| | | | | | 6654-6857 |
| | | | | | 7053-7451 |
| | | | | | 9732-10222 |
| | | | | | 10604-12196 |
| | | | | | 28404-28529 |
| | | | | | 29430-29840 |
| | | | | | 30786-31233 |
| | | | | | 39537-40066 |
| | | | | | 40600-41177 |
| | | | | | 42007-42545 |
| | | | | | 42643-44839 |
| | | | | | 44846-45190 |
| | | | | | 45324-46101 |
| | | | | | 46397-46799 |
| HOCQA47 | 31 | 954934 | AC008990 | 537 | 1-95 |
| | | | | | 1041-1794 |
| HOCQA47 | 31 | 954934 | AC008990 | 538 | 1-530 |
| HOCQA47 | 31 | 954934 | AC010620 | 539 | 1-95 |
| | | | | | 1040-1793 |
| HODEA90 | 32 | 782242 | AL355491 | 540 | 1-899 |
| HODEA90 | 32 | 782242 | AL356112 | 541 | 1-899 |
| HODEA90 | 32 | 782242 | AL355491 | 542 | 1-416 |
| HODEA90 | 32 | 782242 | AL355491 | 543 | 1-301 |
| HODEA90 | 32 | 782242 | AL356112 | 544 | 1-288 |
| HODEA90 | 32 | 782242 | AL356112 | 545 | 1-416 |
| HODEB04 | 33 | 927022 | AL161737 | 546 | 1-785 |
| HODEB04 | 33 | 927022 | AF011889 | 547 | 1-293 |
| | | | | | 352-1342 |
| | | | | | 1367-1727 |
| | | | | | 2768-3573 |
| | | | | | 3651-3720 |
| | | | | | 3725-4121 |
| | | | | | 4727-5495 |
| | | | | | 5535-6146 |
| HODEB04 | 33 | 927022 | AL161737 | 548 | 1-397 |
| HODEB04 | 33 | 927022 | AL161737 | 549 | 1-361 |
| HODEB04 | 33 | 927022 | AF011889 | 550 | 1-169 |
| | | | | | 460-489 |
| | | | | | 1955-2315 |
| | | | | | 2718-2773 |
| | | | | | 4633-4881 |
| | | | | | 6517-7694 |
| HODED11 | 35 | 966085 | AC068205 | 551 | 1-671 |
| HODED11 | 35 | 966085 | AC068205 | 552 | 1-303 |
| HODED55 | 36 | 859368 | AC069425 | 553 | 1-642 |
| HODED55 | 36 | 859368 | AC016937 | 554 | 1-642 |
| HODED55 | 36 | 859368 | AC069204 | 555 | 1-642 |
| HODED55 | 36 | 859368 | AC069425 | 556 | 1-281 |
| HODED55 | 36 | 859368 | AC016937 | 557 | 1-281 |
| HODED55 | 36 | 859368 | AC069425 | 558 | 1-266 |
| HODED55 | 36 | 859368 | AC016937 | 559 | 1-266 |
| HODED55 | 36 | 859368 | AC069204 | 560 | 1-281 |
| HODEG86 | 39 | 784833 | AC013281 | 561 | 1-176 |
| | | | | | 421-500 |
| | | | | | 914-1386 |
| | | | | | 1718-2189 |
| | | | | | 2292-2351 |
| | | | | | 3159-3617 |
| | | | | | 3881-4166 |
| | | | | | 4607-4924 |
| | | | | | 4951-5111 |
| | | | | | 5138-5904 |
| | | | | | 6223-6559 |
| | | | | | 7550-7748 |
| | | | | | 8482-8578 |
| | | | | | 9047-9160 |
| | | | | | 9246-9515 |
| | | | | | 10516-10659 |
| | | | | | 11069-11150 |
| HODEG86 | 39 | 784833 | AC018988 | 562 | 1-176 |
| | | | | | 421-1386 |
| | | | | | 1718-2189 |
| | | | | | 2292-2351 |
| | | | | | 3159-3617 |
| | | | | | 3881-4166 |
| | | | | | 4597-4939 |
| | | | | | 4948-5114 |
| | | | | | 5138-5904 |
| | | | | | 6223-6559 |
| | | | | | 7550-7748 |
| | | | | | 8482-8578 |
| | | | | | 9047-9160 |
| | | | | | 9246-9515 |
| | | | | | 10516-10659 |
| | | | | | 11070-11151 |
| | | | | | 11548-11722 |
| | | | | | 26922-26988 |
| | | | | | 27692-27813 |
| | | | | | 28609-28753 |
| | | | | | 30932-30969 |
| | | | | | 31104-31225 |
| | | | | | 32671-32835 |
| | | | | | 37466-37786 |
| | | | | | 38294-38928 |
| HODEG86 | 39 | 784833 | AC013281 | 563 | 1-277 |
| HODEG86 | 39 | 784833 | AC013281 | 564 | 1-175 |
| HODEG86 | 39 | 784833 | AC018988 | 565 | 1-147 |
| HODEG86 | 39 | 784833 | AC018988 | 566 | 1-277 |
| HODEH22 | 41 | 974329 | AC068231 | 567 | 1-437 |
| HODEH22 | 41 | 974329 | AL357752 | 568 | 1-437 |
| HODEH22 | 41 | 974329 | AC068231 | 569 | 1-287 |
| HODEH22 | 41 | 974329 | AL357752 | 570 | 1-287 |
| HODEI13 | 42 | 859318 | AC046158 | 571 | 1-591 |
| HODEI13 | 42 | 859318 | AC046158 | 572 | 1-409 |
| HODEI13 | 42 | 859318 | AC046158 | 573 | 1-433 |
| HODEK50 | 44 | 859307 | AC007075 | 574 | 1-729 |
| HODEK50 | 44 | 859307 | AC007075 | 575 | 1-401 |
| HODEL92 | 45 | 859313 | AL139296 | 576 | 1-470 |
| HODEO87 | 47 | 930735 | AC069316 | 577 | 1-660 |
| HODEO87 | 47 | 930735 | AP002762 | 578 | 1-660 |
| HODEO87 | 47 | 930735 | AC069316 | 579 | 1-253 |
| HODEO87 | 47 | 930735 | AP002762 | 580 | 1-253 |
| HODEO87 | 47 | 930735 | AC069316 | 581 | 1-84 |
| HODEO87 | 47 | 930735 | AP002762 | 582 | 1-84 |
| HODEP12 | 49 | 965534 | AC012659 | 583 | 1-490 |
| HODEP12 | 49 | 965534 | AJ132410 | 584 | 1-490 |
| HODEP12 | 49 | 965534 | AJ132411 | 585 | 1-490 |
| HODEP12 | 49 | 965534 | AC012659 | 586 | 1-363 |
| HODEP12 | 49 | 965534 | AJ132410 | 587 | 1-363 |
| HODEP12 | 49 | 965534 | AJ132411 | 588 | 1-363 |
| HODEP12 | 49 | 965534 | AJ132410 | 589 | 1-352 |
| HODEP86 | 50 | 784846 | AC068146 | 590 | 1-512 |
| HODEP86 | 50 | 784846 | AC009292 | 591 | 1-512 |
| HODEP86 | 50 | 784846 | AC068146 | 592 | 1-366 |
| HODEP86 | 50 | 784846 | AC068146 | 593 | 1-252 |
| HODEP86 | 50 | 784846 | AC009292 | 594 | 1-252 |
| HODEP86 | 50 | 784846 | AC009292 | 595 | 1-366 |
| HODEQ79 | 52 | 859287 | AL049820 | 596 | 1-599 |
| HODEQ79 | 52 | 859287 | AL049820 | 597 | 1-107 |
| HODEQ79 | 52 | 859287 | AL049820 | 598 | 1-373 |
| HODES86 | 53 | 784815 | AC023311 | 599 | 1-1229 |
| HODES86 | 53 | 784815 | AC068764 | 600 | 1-1429 |
| HODEY08 | 58 | 972984 | AC025975 | 601 | 1-155 |
| | | | | | 3629-3751 |
| | | | | | 4620-4829 |
| | | | | | 6019-6195 |
| | | | | | 7728-8138 |
| | | | | | 9330-9484 |
| | | | | | 9973-11639 |
| HODEY08 | 58 | 972984 | AC025975 | 602 | 1-422 |
| HODEY08 | 58 | 972984 | AC025975 | 603 | 1-624 |
| HODEY13 | 59 | 859323 | AC023757 | 604 | 1-683 |
| HODEY13 | 59 | 859323 | AC023757 | 605 | 1-304 |
| HODEY13 | 59 | 859323 | AC023757 | 606 | 1-279 |
| HODEY80 | 60 | 859296 | AL049821 | 607 | 1-892 |
| HODEZ11 | 61 | 952166 | AL049780 | 608 | 1-79 |
| | | | | | 1741-2345 |
| | | | | | 2372-4365 |
| | | | | | 4520-4951 |
| | | | | | 4965-5086 |
| | | | | | 8909-9080 |
| | | | | | 9623-9884 |
| | | | | | 11171-11276 |
| | | | | | 11444-11552 |
| | | | | | 12317-12505 |
| | | | | | 12525-12605 |
| | | | | | 13051-13119 |
| | | | | | 13647-13742 |
| | | | | | 14956-15395 |
| | | | | | 15412-15622 |
| | | | | | 16059-16168 |
| | | | | | 17969-18042 |
| | | | | | 18135-18576 |
| | | | | | 18752-19394 |
| | | | | | 20745-21012 |
| | | | | | 21580-21955 |
| | | | | | 26195-26275 |
| | | | | | 27457-27874 |
| | | | | | 28194-28464 |
| | | | | | 28567-28646 |
| | | | | | 30337-30467 |
| | | | | | 30873-31422 |
| | | | | | 32480-32632 |
| | | | | | 33300-33564 |
| | | | | | 33909-33994 |
| | | | | | 34103-34189 |
| | | | | | 34258-35147 |
| HODEZ11 | 61 | 952166 | AC006530 | 609 | 1-79 |
| | | | | | 1741-2345 |
| | | | | | 2372-4365 |
| | | | | | 4520-4951 |
| | | | | | 4965-5086 |
| | | | | | 8909-9080 |
| | | | | | 9623-9884 |
| | | | | | 10977-11278 |
| | | | | | 11446-11554 |
| | | | | | 12290-12489 |
| | | | | | 12509-12589 |
| | | | | | 13035-13103 |
| | | | | | 14941-15380 |
| | | | | | 15397-15607 |
| | | | | | 17239-17337 |
| | | | | | 17953-18026 |
| | | | | | 18119-18560 |
| | | | | | 18736-19378 |
| | | | | | 20729-20996 |
| | | | | | 21563-21938 |
| | | | | | 24485-24568 |
| | | | | | 26177-26257 |
| | | | | | 26973-27081 |
| | | | | | 27090-27231 |
| | | | | | 27439-27856 |
| | | | | | 28176-28446 |
| | | | | | 28549-28628 |
| | | | | | 30319-30449 |
| | | | | | 30855-31404 |
| | | | | | 32460-32612 |
| | | | | | 33295-33452 |
| | | | | | 33889-34006 |
| | | | | | 34238-35127 |
| HODEZ11 | 61 | 952166 | AL049780 | 610 | 1-76 |
| | | | | | 1605-2548 |
| | | | | | 2583-4747 |
| HODEZ11 | 61 | 952166 | AL049780 | 611 | 1-1091 |
| HODEZ11 | 61 | 952166 | AC006530 | 612 | 1-1090 |
| HODEZ11 | 61 | 952166 | AC006530 | 613 | 1-269 |
| HODFA38 | 62 | 934266 | AC016992 | 614 | 1-649 |
| HODFB88 | 65 | 792979 | AC008651 | 615 | 1-368 |
| | | | | | 2142-2889 |
| | | | | | 3649-3930 |
| | | | | | 5148-5773 |
| | | | | | 6717-7220 |
| | | | | | 7679-8094 |
| | | | | | 8917-9211 |
| | | | | | 9671-9754 |
| | | | | | 10002-10093 |
| HODFB88 | 65 | 792979 | AC008651 | 616 | 1-83 |
| HODFD08 | 66 | 958371 | AL354943 | 617 | 1-396 |
| HODFD08 | 66 | 958371 | AL354943 | 618 | 1-322 |
| HODFD45 | 68 | 780531 | AC009263 | 619 | 1-401 |
| HODFD45 | 68 | 780531 | AC009263 | 620 | 1-316 |
| HODFH02 | 71 | 915257 | AC025139 | 621 | 1-706 |
| HODFK18 | 73 | 974313 | AC068404 | 622 | 1-1251 |
| HODFK18 | 73 | 974313 | AC068404 | 623 | 1-405 |
| HODFQ06 | 79 | 934304 | AL365325 | 624 | 1-529 |
| HODFQ06 | 79 | 934304 | AL356748 | 625 | 1-529 |
| HODFQ06 | 79 | 934304 | AC005815 | 626 | 1-529 |
| HODFQ06 | 79 | 934304 | AL365325 | 627 | 1-290 |
| HODFQ06 | 79 | 934304 | AL356748 | 628 | 1-290 |
| HODFQ06 | 79 | 934304 | AC005815 | 629 | 1-290 |
| HODFT52 | 80 | 915232 | AC069418 | 630 | 1-988 |
| HODFT52 | 80 | 915232 | AC078803 | 631 | 1-994 |
| HODFU02 | 81 | 918536 | AC027603 | 632 | 1-601 |
| HODFU02 | 81 | 918536 | AC011319 | 633 | 1-601 |
| HODFU02 | 81 | 918536 | AC011319 | 634 | 1-515 |
| HODFU02 | 81 | 918536 | AC027603 | 635 | 1-515 |
| HODFU47 | 83 | 806232 | AC069029 | 636 | 1-1072 |
| HODFU47 | 83 | 806232 | AC055807 | 637 | 1-1072 |
| HODFU47 | 83 | 806232 | AC069029 | 638 | 1-383 |
| HODFU47 | 83 | 806232 | AC055807 | 639 | 1-383 |
| HODFU54 | 84 | 965526 | AC022944 | 640 | 1-584 |
| HODFU54 | 84 | 965526 | AC022944 | 641 | 1-105 |
| HODFU54 | 84 | 965526 | AC022944 | 642 | 1-199 |
| HODFW17 | 85 | 859322 | AC012240 | 643 | 1-592 |
| HODFW17 | 85 | 859322 | AC018633 | 644 | 1-612 |
| HODFW17 | 85 | 859322 | AC018633 | 645 | 1-82 |
| | | | | | 84-446 |
| HODFW17 | 85 | 859322 | AC018633 | 646 | 1-173 |
| HODFX57 | 86 | 975259 | AC026229 | 647 | 1-420 |
| HODFX57 | 86 | 975259 | AC022108 | 648 | 1-421 |
| HODFX57 | 86 | 975259 | AC026229 | 649 | 1-294 |
| HODFX57 | 86 | 975259 | AC022108 | 650 | 1-295 |
| HODFX57 | 86 | 975259 | AC026229 | 651 | 1-309 |
| HODFX57 | 86 | 975259 | AC022108 | 652 | 1-697 |
| HODFY16 | 87 | 958329 | AL138499 | 653 | 1-74 |
| | | | | | 1171-1414 |
| | | | | | 2003-2145 |
| | | | | | 5281-5390 |
| | | | | | 6571-6708 |
| | | | | | 7273-8042 |
| | | | | | 8498-8581 |
| | | | | | 9242-9411 |
| | | | | | 9823-9893 |
| | | | | | 11229-11269 |
| | | | | | 11959-12050 |
| | | | | | 12418-12490 |
| | | | | | 12981-13017 |
| | | | | | 13172-13255 |
| | | | | | 13739-13807 |
| | | | | | 16333-16490 |
| | | | | | 16856-16966 |
| | | | | | 17025-17457 |
| | | | | | 19018-19053 |
| | | | | | 19571-19708 |
| | | | | | 19739-20018 |
| | | | | | 20071-20166 |
| | | | | | 20847-20919 |
| | | | | | 21057-21542 |
| | | | | | 21820-21861 |
| | | | | | 22375-22563 |
| | | | | | 22606-22687 |
| | | | | | 23332-23536 |
| | | | | | 23934-23974 |
| | | | | | 24441-25133 |
| | | | | | 25607-26151 |
| | | | | | 27567-27728 |
| | | | | | 28089-28180 |
| | | | | | 30591-30662 |
| | | | | | 31711-31750 |
| | | | | | 32025-32303 |
| | | | | | 32728-33189 |
| | | | | | 33569-33660 |
| | | | | | 34582-35243 |
| | | | | | 36002-36089 |
| | | | | | 37700-38027 |
| | | | | | 38479-39379 |
| | | | | | 39447-39994 |
| | | | | | 39996-40412 |
| | | | | | 40939-41175 |
| | | | | | 42777-42859 |
| | | | | | 43613-43709 |
| | | | | | 43834-43926 |
| | | | | | 44676-44750 |
| | | | | | 44978-45061 |
| | | | | | 45219-45304 |
| | | | | | 45604-46116 |
| | | | | | 46592-46981 |
| | | | | | 47116-47969 |
| | | | | | 49128-49249 |
| | | | | | 49765-50272 |
| | | | | | 50400-50495 |
| | | | | | 50679-50942 |
| | | | | | 51613-51736 |
| | | | | | 52713-52789 |
| | | | | | 54124-54402 |
| | | | | | 54837-55118 |
| | | | | | 55215-55764 |
| | | | | | 56143-56632 |
| HODFY16 | 87 | 958329 | AL138499 | 654 | 1-386 |
| | | | | | 635-1149 |
| HODFY79 | 88 | 975253 | AC027445 | 655 | 1-644 |
| HODFY79 | 88 | 975253 | AC061706 | 656 | 1-644 |
| HODFY79 | 88 | 975253 | AC027445 | 657 | 1-477 |
| HODGC04 | 89 | 926863 | AC019014 | 658 | 1-244 |
| HODGC61 | 90 | 973449 | AC020695 | 659 | 1-663 |
| HODGC61 | 90 | 973449 | AC017086 | 660 | 1-663 |
| HODGC61 | 90 | 973449 | AL135932 | 661 | 1-663 |
| HODGC61 | 90 | 973449 | AC020695 | 662 | 1-340 |
| HODGC61 | 90 | 973449 | AC017086 | 663 | 1-340 |
| HODGC61 | 90 | 973449 | AL135932 | 664 | 1-340 |
| HODGD05 | 91 | 931071 | AL355304 | 665 | 1-176 |
| HODGD05 | 91 | 931071 | AL355307 | 666 | 1-176 |
| HODGD05 | 91 | 931071 | AL355304 | 667 | 1-90 |
| HODGD05 | 91 | 931071 | AL355307 | 668 | 1-90 |
| HODGD05 | 91 | 931071 | AL355307 | 669 | 1-408 |
| HODGH11 | 95 | 965105 | AL133463 | 670 | 1-642 |
| HODGH11 | 95 | 965105 | AL050320 | 671 | 1-642 |
| HODGJ67 | 97 | 974297 | AL356804 | 672 | 1-414 |
| HODGM46 | 98 | 974051 | AC002351 | 673 | 1-1278 |
| | | | | | 2155-2236 |
| HODGM46 | 98 | 974051 | AC002369 | 674 | 1-586 |
| | | | | | 2559-2651 |
| | | | | | 3329-3426 |
| | | | | | 3756-5088 |
| HODGM46 | 98 | 974051 | AC002351 | 675 | 1-115 |
| HODGM46 | 98 | 974051 | AC002369 | 676 | 1-228 |
| HODGO46 | 99 | 883087 | AC037489 | 677 | 1-346 |
| | | | | | 1670-2284 |
| | | | | | 2466-2854 |
| | | | | | 4400-4511 |
| | | | | | 6053-6599 |
| | | | | | 7153-7508 |
| | | | | | 8502-8724 |
| | | | | | 9716-10001 |
| | | | | | 11982-12304 |
| HODGO46 | 99 | 883087 | AC019171 | 678 | 1-669 |
| | | | | | 797-1185 |
| | | | | | 2733-2844 |
| | | | | | 4386-4932 |
| | | | | | 5136-5165 |
| HODGO46 | 99 | 883087 | AC037489 | 679 | 1-1408 |
| HODGO46 | 99 | 883087 | AC037489 | 680 | 1-175 |
| HODGO46 | 99 | 883087 | AC019171 | 681 | 1-356 |
| HODGO46 | 99 | 883087 | AC019171 | 682 | 1-345 |
| HODGP37 | 100 | 974293 | AC023592 | 683 | 1-570 |
| HODGP37 | 100 | 974293 | AC069441 | 684 | 1-570 |
| HODGP83 | 101 | 889967 | AC013723 | 685 | 1-110 |
| | | | | | 1542-2027 |
| | | | | | 3382-3689 |
| | | | | | 5800-5966 |
| HODGP83 | 101 | 889967 | AC009973 | 686 | 1-74 |
| | | | | | 1507-2339 |
| | | | | | 3336-3657 |
| | | | | | 5766-5932 |
| HODGP83 | 101 | 889967 | AC013723 | 687 | 1-499 |
| HODGP83 | 101 | 889967 | AC013723 | 688 | 1-314 |
| HODGP83 | 101 | 889967 | AC009973 | 689 | 1-314 |
| HODGP83 | 101 | 889967 | AC009973 | 690 | 1-499 |
| HODGP08 | 103 | 958237 | AC026000 | 691 | 1-509 |
| HODGP08 | 103 | 958237 | AC025510 | 692 | 1-509 |
| HODGP32 | 105 | 974294 | AC024497 | 693 | 1-705 |
| HODGP32 | 105 | 974294 | AC024497 | 694 | 1-3866 |
| HODGQ92 | 106 | 894368 | AP000751 | 695 | 1-96 |
| | | | | | 1450-1596 |
| | | | | | 2035-2116 |
| HODGQ92 | 106 | 894368 | AP000751 | 696 | 1-369 |
| HODGT62 | 107 | 974052 | ACO11008 | 697 | 1-731 |
| HODGT62 | 107 | 974052 | AC044783 | 698 | 1-731 |
| HODGW08 | 108 | 958277 | AL121966 | 699 | 1-562 |
| HODGW08 | 108 | 958277 | AC025054 | 700 | 1-562 |
| HODGW08 | 108 | 958277 | AC009425 | 701 | 1-562 |
| HODGW08 | 108 | 958277 | AL121966 | 702 | 1-485 |
| HODGW08 | 108 | 958277 | AC025054 | 703 | 1-409 |
| HODGW08 | 108 | 958277 | AL121966 | 704 | 1-409 |
| HODGW08 | 108 | 958277 | AC025054 | 705 | 1-485 |
| HODGW08 | 108 | 958277 | AC009425 | 706 | 1-485 |
| HODGW08 | 108 | 958277 | AC009425 | 707 | 1-409 |
| HODGZ06 | 111 | 933783 | AC007685 | 708 | 1-452 |
| | | | | | 497-619 |
| | | | | | 1248-2116 |
| | | | | | 2423-2493 |
| | | | | | 2610-2725 |
| | | | | | 3566-3716 |
| | | | | | 4422-4552 |
| | | | | | 6708-7287 |
| | | | | | 12653-12705 |
| | | | | | 12963-13427 |
| | | | | | 17808-17904 |
| HODGZ06 | 111 | 933783 | AC007685 | 709 | 1-160 |
| HODGZ06 | 111 | 933783 | AC007685 | 710 | 1-2806 |
| | | | | | 2896-4507 |
| HODGZ10 | 112 | 961977 | AC064861 | 711 | 1-85 |
| | | | | | 1146-1687 |
| HODGZ10 | 112 | 961977 | AC073838 | 712 | 1-86 |
| | | | | | 1147-1688 |
| HODGZ10 | 112 | 961977 | AC064861 | 713 | 1-399 |
| HODGZ10 | 112 | 961977 | AC073838 | 714 | 1-399 |
| HODHC03 | 113 | 922987 | AC009237 | 715 | 1-1362 |
| HODHC03 | 113 | 922987 | AC009237 | 716 | 1-720 |
| HODHC03 | 113 | 922987 | AC009237 | 717 | 1-307 |
| | | | | | 580-1408 |
| HODHK02 | 115 | 918613 | AC009944 | 718 | 1-301 |
| HODHK02 | 115 | 918613 | AC019299 | 719 | 1-301 |
| HODHK02 | 115 | 918613 | AC009822 | 720 | 1-301 |
| HODHK02 | 115 | 918613 | AC019299 | 721 | 1-483 |
| HODHK02 | 115 | 918613 | AC009944 | 722 | 1-483 |
| HODHK02 | 115 | 918613 | AC009822 | 723 | 1-483 |
| HODHO11 | 117 | 965529 | AC027399 | 724 | 1-317 |
| HODHO11 | 117 | 965529 | AC027399 | 725 | 1-318 |
| HODHS34 | 118 | 965460 | AC022665 | 726 | 1-532 |
| HODHS34 | 118 | 965460 | AL078646 | 727 | 1-317 |
| | | | | | 372-1502 |
| HODHS34 | 118 | 965460 | AL117349 | 728 | 1-317 |
| | | | | | 372-1502 |
| HODHS34 | 118 | 965460 | AL078646 | 729 | 1-615 |
| HODHS34 | 118 | 965460 | AL117349 | 730 | 1-615 |
| HODHY53 | 119 | 914554 | AC026367 | 731 | 1-669 |
| HODHY53 | 119 | 914554 | AC027063 | 732 | 1-669 |
| HODJZ90 | 122 | 965049 | AC009118 | 733 | 1-155 |
| | | | | | 657-767 |
| | | | | | 862-1035 |
| | | | | | 1706-2237 |
| | | | | | 2902-3158 |
| | | | | | 3800-4185 |
| | | | | | 4530-4783 |
| | | | | | 5286-5461 |
| | | | | | 6519-6695 |
| | | | | | 6845-6976 |
| | | | | | 7956-8460 |
| | | | | | 8578-8682 |
| | | | | | 10277-10454 |
| | | | | | 12772-12939 |
| | | | | | 13545-13749 |
| | | | | | 14101-14364 |
| | | | | | 15084-15617 |
| | | | | | 16693-17078 |
| | | | | | 17284-17820 |
| | | | | | 17893-18820 |
| HODJZ90 | 122 | 965049 | AC068659 | 734 | 1-168 |
| | | | | | 775-979 |
| | | | | | 1331-1594 |
| | | | | | 2315-2847 |
| | | | | | 3900-4316 |
| | | | | | 4491-5027 |
| | | | | | 5100-7427 |
| | | | | | 7603-8027 |
| | | | | | 8209-8523 |
| | | | | | 9220-9673 |
| | | | | | 9808-9950 |
| | | | | | 10065-10377 |
| HODJZ90 | 122 | 965049 | AC010287 | 735 | 1-152 |
| | | | | | 1091-1213 |
| | | | | | 1460-1748 |
| | | | | | 2882-3432 |
| | | | | | 5178-5410 |
| | | | | | 5727-5869 |
| | | | | | 7099-7282 |
| | | | | | 8390-8552 |
| | | | | | 9319-9434 |
| | | | | | 9703-9816 |
| | | | | | 10255-10328 |
| | | | | | 10502-10681 |
| | | | | | 11511-11641 |
| | | | | | 13098-13673 |
| | | | | | 14293-14594 |
| | | | | | 14667-14772 |
| | | | | | 15383-15627 |
| | | | | | 17040-17237 |
| | | | | | 18114-18254 |
| | | | | | 18756-18866 |
| | | | | | 18961-19136 |
| | | | | | 19803-20334 |
| | | | | | 20999-21280 |
| | | | | | 21897-22282 |
| | | | | | 22627-22880 |
| | | | | | 23383-23641 |
| | | | | | 24623-24788 |
| | | | | | 24938-25069 |
| | | | | | 26048-26552 |
| | | | | | 26670-26774 |
| | | | | | 28368-28545 |
| | | | | | 30865-31032 |
| | | | | | 31639-31843 |
| | | | | | 32195-32458 |
| | | | | | 33179-33711 |
| | | | | | 34763-35179 |
| | | | | | 35354-35890 |
| | | | | | 35963-38290 |
| | | | | | 38466-38890 |
| | | | | | 39072-39386 |
| | | | | | 40083-40535 |
| | | | | | 40670-40812 |
| | | | | | 40927-41239 |
| HODJZ90 | 122 | 965049 | AC068659 | 736 | 1-374 |
| HODJZ90 | 122 | 965049 | AC010287 | 737 | 1-374 |
| HODJZ90 | 122 | 965049 | AC010287 | 738 | 1-552 |
| HOVJA10 | 124 | 961467 | AL160290 | 739 | 1-442 |
| HOVJA10 | 124 | 961467 | AL160290 | 740 | 1-119 |
| HPCPO07 | 126 | 951826 | AC010595 | 741 | 1-512 |
| HPCPO07 | 126 | 951826 | AC021175 | 742 | 1-512 |
| HPDOY06 | 127 | 929318 | AC024534 | 743 | 1-472 |
| HPDOY06 | 127 | 929318 | AC068222 | 744 | 1-670 |
| | | | | | 818-1289 |
| | | | | | 1297-1525 |
| HPDOY06 | 127 | 929318 | AC068222 | 745 | 1-119 |
| HPDOY06 | 127 | 929318 | AC024534 | 746 | 1-670 |
| HPDPK12 | 128 | 969340 | AC016737 | 747 | 1-1302 |
| HPDPK12 | 128 | 969340 | AC016737 | 748 | 1-241 |
| HPDPQ40 | 129 | 922464 | AC016731 | 749 | 1-608 |
| HPDPQ40 | 129 | 922464 | AC073119 | 750 | 1-608 |
| HPDPQ40 | 129 | 922464 | AC016731 | 751 | 1-603 |
| HPDRD28 | 131 | 957791 | AL139377 | 752 | 1-483 |
| HPDRD28 | 131 | 957791 | AL139377 | 753 | 1-412 |
| HPDRD28 | 131 | 957791 | AL139377 | 754 | 1-411 |
| HPDRG92 | 132 | 967704 | AC069546 | 755 | 1-131 |
| | | | | | 220-297 |
| | | | | | 620-921 |
| | | | | | 1555-1722 |
| | | | | | 1899-2066 |
| | | | | | 2727-3464 |
| | | | | | 4649-5150 |
| HPDRG92 | 132 | 967704 | AC012683 | 756 | 1-131 |
| | | | | | 220-297 |
| | | | | | 620-921 |
| | | | | | 1555-1722 |
| | | | | | 1899-2066 |
| | | | | | 2727-3464 |
| | | | | | 4650-5151 |
| HPDRG92 | 132 | 967704 | AC069546 | 757 | 1-116 |
| HPDRG92 | 132 | 967704 | AC012683 | 758 | 1-861 |
| HPDRG92 | 132 | 967704 | AC012683 | 759 | 1-45 |
| | | | | | 915-1022 |
| HPDRO20 | 133 | 957678 | AC027421 | 760 | 1-426 |
| HPDRO20 | 133 | 957678 | AL353622 | 761 | 1-172 |
| | | | | | 180-293 |
| | | | | | 2209-2873 |
| | | | | | 2876-3301 |
| | | | | | 4705-6461 |
| | | | | | 6539-6708 |
| HPDRO20 | 133 | 957678 | AC025860 | 762 | 1-426 |
| HPDRO20 | 133 | 957678 | AC027421 | 763 | 1-527 |
| HPDRO20 | 133 | 957678 | AC025860 | 764 | 1-665 |
| HPDVY17 | 136 | 955902 | AC007009 | 765 | 1-435 |
| HVCBV04 | 138 | 925844 | AL358172 | 766 | 1-717 |
| HVCBV04 | 138 | 925844 | AL136370 | 767 | 1-717 |
| HVCBV04 | 138 | 925844 | AL358172 | 768 | 1-356 |
| HVCBV04 | 138 | 925844 | AL358172 | 769 | 1-647 |
| HVCBV04 | 138 | 925844 | AL136370 | 770 | 1-356 |
| HVCBV04 | 138 | 925844 | AL136370 | 771 | 1-647 |
| HVCCK04 | 140 | 925796 | AC009861 | 772 | 1-1379 |
| HVCCK04 | 140 | 925796 | AC016949 | 773 | 1-1381 |
| HVCCK04 | 140 | 925796 | AC009861 | 774 | 1-743 |
| HVCCK04 | 140 | 925796 | AC009861 | 775 | 1-855 |
| HVCCK04 | 140 | 925796 | AC016949 | 776 | 1-855 |
| HVCCK04 | 140 | 925796 | AC016949 | 777 | 1-86 |
| | | | | | 589-770 |
| | | | | | 1468-2212 |
| | | | | | 2994-5375 |
| | | | | | 5393-7226 |
| | | | | | 7602-9856 |
| | | | | | 10092-10593 |
| | | | | | 11034-11679 |
| | | | | | 13908-14759 |
| HVVBK45 | 144 | 964102 | AL162853 | 778 | 1-3940 |
| HVVBK45 | 144 | 964102 | AC068175 | 779 | 1-1900 |
| HVVBK45 | 144 | 964102 | Z98172 | 780 | 1-100 |
| | | | | | 3320-6223 |
| | | | | | 6258-7123 |
| HVVBK45 | 144 | 964102 | AL162853 | 781 | 1-476 |
| HVVBK45 | 144 | 964102 | AL162853 | 782 | 1-1290 |
| | | | | | 1418-2787 |
| HVVBK45 | 144 | 964102 | AC068175 | 783 | 1-865 |
| HVVBV44 | 145 | 917559 | AC008719 | 784 | 1-242 |
| HVVCO01 | 146 | 913996 | AC053484 | 785 | 1-889 |
| HVVCO01 | 146 | 913996 | AC023961 | 786 | 1-889 |
| HVVBM06 | 149 | 933528 | AF188031 | 787 | 1-186 |
| | | | | | 744-865 |
| | | | | | 3969-4014 |
| | | | | | 4551-4771 |
| | | | | | 5464-5965 |
| HVVBM06 | 149 | 933528 | AF188031 | 788 | 1-481 |
| HVVBM06 | 149 | 933528 | AF188031 | 789 | 1-292 |
| HPDWR11 | 150 | 965249 | AC016344 | 790 | 1-647 |
| HPDWR11 | 150 | 965249 | AC018796 | 791 | 1-643 |
| HPDWR11 | 150 | 965249 | AC010857 | 792 | 1-643 |
| HPDWR11 | 150 | 965249 | AC018796 | 793 | 1-422 |
| HPDWR11 | 150 | 965249 | AC010857 | 794 | 1-422 |
| HPDWN05 | 151 | 928563 | AC009871 | 795 | 1-599 |
| | | | | | 896-1375 |
| HPDWN05 | 151 | 928563 | AC009812 | 796 | 1-599 |
| | | | | | 896-1375 |
| HPDWN05 | 151 | 928563 | AC009871 | 797 | 1-99 |
| HPDWN05 | 151 | 928563 | AC009871 | 798 | 1-4119 |
| HPDWN05 | 151 | 928563 | AC009812 | 799 | 1-99 |
| HPDWN05 | 151 | 928563 | AC009812 | 800 | 1-74 |
| | | | | | 277-452 |
| | | | | | 718-5961 |
| HPDRR06 | 155 | 968601 | AC073389 | 801 | 1-1034 |
| HPDRR06 | 155 | 968601 | AL359074 | 802 | 1-92 |
| | | | | | 1559-2178 |
| | | | | | 2181-3214 |
| HPDRR06 | 155 | 968601 | AC073389 | 803 | 1-615 |
| HPDRR06 | 155 | 968601 | AL359074 | 804 | 1-652 |
| HPDRR06 | 155 | 968601 | AL359074 | 805 | 1-465 |
| | | | | | 596-748 |
| | | | | | 790-866 |
| HPDRN07 | 156 | 951838 | AC073930 | 806 | 1-2176 |
| HPDRN07 | 156 | 951838 | AC073865 | 807 | 1-2174 |
| HPDRN07 | 156 | 951838 | AC073930 | 808 | 1-449 |
| HPDRN07 | 156 | 951838 | AC073865 | 809 | 1-849 |
| HPDRN07 | 156 | 951838 | AC073930 | 810 | 1-849 |
| HPDRN07 | 156 | 951838 | AC073865 | 811 | 1-449 |
| HPDRG01 | 157 | 914416 | AL356152 | 812 | 1-773 |
| HPDRG01 | 157 | 914416 | AL158082 | 813 | 1-773 |
| HPDRG01 | 157 | 914416 | AL158082 | 814 | 1-153 |
| HPDRG01 | 157 | 914416 | AL356152 | 815 | 1-602 |
| HPDPS12 | 158 | 969342 | AC073487 | 816 | 1-375 |
| | | | | | 893-4326 |
| | | | | | 4474-5168 |
| | | | | | 5186-6317 |
| | | | | | 6538-6708 |
| | | | | | 6755-7192 |
| | | | | | 7587-9453 |
| HPDPS12 | 158 | 969342 | AC023055 | 817 | 1-246 |
| | | | | | 485-1179 |
| | | | | | 1198-2329 |
| | | | | | 2550-2720 |
| | | | | | 2767-3204 |
| | | | | | 3603-5469 |
| HPDPS12 | 158 | 969342 | AC073487 | 818 | 1-646 |
| HPDPS12 | 158 | 969342 | AC023055 | 819 | 1-428 |
| HPDPS12 | 158 | 969342 | AC023055 | 820 | 1-245 |
| HPDPP12 | 159 | 969341 | AP001097 | 821 | 1-481 |
| HPDPP12 | 159 | 969341 | AC021474 | 822 | 1-579 |
| HPDPP12 | 159 | 969341 | AP000931 | 823 | 1-579 |
| HPDPP12 | 159 | 969341 | AP001097 | 824 | 1-125 |
| HPDPP12 | 159 | 969341 | AC021474 | 825 | 1-125 |
| HPDPP12 | 159 | 969341 | AP000931 | 826 | 1-453 |
| HPDPP12 | 159 | 969341 | AC021474 | 827 | 1-451 |
| HPDOW10 | 161 | 961782 | AC026088 | 828 | 1-494 |
| HPDOF11 | 163 | 965491 | AL390721 | 829 | 1-912 |
| HPDOF11 | 163 | 965491 | AL021997 | 830 | 1-233 |
| | | | | | 901-1252 |
| | | | | | 1400-1967 |
| | | | | | 2803-2939 |
| | | | | | 3883-4324 |
| | | | | | 4569-5633 |
| | | | | | 7594-8505 |
| | | | | | 8713-11051 |
| HPDOF11 | 163 | 965491 | AL390721 | 831 | 1-2339 |
| HPCTK02 | 164 | 917480 | AL158074 | 832 | 1-42 |
| | | | | | 468-1132 |
| | | | | | 1279-1726 |
| HPCTK02 | 164 | 917480 | AC013579 | 833 | 1-42 |
| | | | | | 468-1129 |
| | | | | | 1276-1721 |
| HPCTK02 | 164 | 917480 | AL158074 | 834 | 1-117 |
| HPCTK02 | 164 | 917480 | AC013579 | 835 | 1-740 |
| | | | | | 1026-1325 |
| | | | | | 1835-2355 |
| HPCTC04 | 166 | 925777 | AC006198 | 836 | 1-972 |
| HPCTC04 | 166 | 925777 | AL079338 | 837 | 1-972 |
| HPCTC04 | 166 | 925777 | AC006198 | 838 | 1-597 |
| HPCTC04 | 166 | 925777 | AL079338 | 839 | 1-572 |
| HPCTC04 | 166 | 925777 | AC006198 | 840 | 1-187 |
| HPCTC04 | 166 | 925777 | AL079338 | 841 | 1-187 |
| HPCOV68 | 169 | 911075 | AC026794 | 842 | 1-1027 |
| HPCOV68 | 169 | 911075 | AC004500 | 843 | 1-1004 |
| HPCOV68 | 169 | 911075 | AC026794 | 844 | 1-102 |
| HPCOV68 | 169 | 911075 | AC004500 | 845 | 1-102 |
| HOOKE10 | 171 | 961499 | AC023183 | 846 | 1-493 |
| HOOKF10 | 171 | 961499 | AC026678 | 847 | 1-493 |
| HOOKF10 | 171 | 961499 | AC026365 | 848 | 1-493 |
| HOOKF10 | 171 | 961499 | AC026678 | 849 | 1-480 |
| HOOKF10 | 171 | 961499 | AC023183 | 850 | 1-480 |
| HOOKF10 | 171 | 961499 | AC026365 | 851 | 1-480 |
| HOOJU04 | 173 | 925774 | AC048331 | 852 | 1-59 |
| | | | | | 317-593 |
| HOOJU04 | 173 | 925774 | AC024530 | 853 | 1-59 |
| | | | | | 317-593 |
| HOOJU04 | 173 | 925774 | AC061705 | 854 | 1-59 |
| | | | | | 317-593 |
| HOOJU04 | 173 | 925774 | AC048331 | 855 | 1-572 |
| HOOJU04 | 173 | 925774 | AC024530 | 856 | 1-91 |
| | | | | | 184-640 |
| | | | | | 785-2468 |
| | | | | | 2676-2898 |
| HOOJU04 | 173 | 925774 | AC061705 | 857 | 1-91 |
| | | | | | 184-640 |
| | | | | | 785-2468 |
| | | | | | 2676-2898 |
| HOOJU04 | 173 | 925774 | AC024530 | 858 | 1-453 |
| HOOJU04 | 173 | 925774 | ACO61705 | 859 | 1-572 |
| HOOJN04 | 174 | 925783 | AL035684 | 860 | 1-55 |
| | | | | | 2293-2465 |
| | | | | | 3852-3951 |
| | | | | | 5485-5583 |
| | | | | | 6544-6662 |
| | | | | | 7772-7947 |
| | | | | | 8614-9071 |
| | | | | | 10099-10166 |
| | | | | | 10618-10710 |
| | | | | | 10715-11030 |
| | | | | | 12681-12959 |
| | | | | | 13821-13979 |
| | | | | | 16726-17090 |
| | | | | | 17491-18237 |
| | | | | | 19028-19138 |
| | | | | | 20072-20129 |
| | | | | | 22633-22838 |
| | | | | | 26307-31140 |
| HOOJN04 | 174 | 925783 | AL035684 | 861 | 1-573 |
| HOOJN04 | 174 | 925783 | AL035684 | 862 | 1-498 |
| HOOJH05 | 176 | 928627 | AC021154 | 863 | 1-935 |
| HOOJH05 | 176 | 928627 | AC011452 | 864 | 1-934 |
| HOOJH05 | 176 | 928627 | AC011452 | 865 | 1-101 |
| HOOIG03 | 179 | 922510 | AC016883 | 866 | 1-429 |
| HOOIG03 | 179 | 922510 | AC073155 | 867 | 1-429 |
| HOOIG03 | 179 | 922510 | AC018714 | 868 | 1-429 |
| HOOHP02 | 180 | 917424 | AC013669 | 869 | 1-487 |
| HOOHP02 | 180 | 917424 | AC013669 | 870 | 1-181 |
| | | | | | 291-782 |
| | | | | | 2171-2360 |
| | | | | | 2703-3570 |
| | | | | | 4336-4689 |
| | | | | | 5249-5785 |
| | | | | | 5817-6442 |
| | | | | | 6834-7458 |
| HODKG07 | 183 | 951875 | AC072035 | 871 | 1-786 |
| HODKG07 | 183 | 951875 | AC072035 | 872 | 1-389 |
| HODGL88 | 188 | 859300 | AC020988 | 873 | 1-886 |
| | | | | | 900-3110 |
| HODGL88 | 188 | 859300 | AC020988 | 874 | 1-318 |
| HODGL88 | 188 | 859300 | AC020988 | 875 | 1-320 |
| HODFY10 | 190 | 963350 | AC015464 | 876 | 1-718 |
| HODFY10 | 190 | 963350 | AL133284 | 877 | 1-718 |
| HODFY10 | 190 | 963350 | AC015464 | 878 | 1-779 |
| HODFY10 | 190 | 963350 | AC015464 | 879 | 1-940 |
| HODFY10 | 190 | 963350 | AL133284 | 880 | 1-3485 |
| | | | | | 8125-8521 |
| | | | | | 14884-15094 |
| | | | | | 17015-17375 |
| | | | | | 18078-21722 |
| | | | | | 21824-22143 |
| | | | | | 23417-24165 |
| HODFY10 | 190 | 963350 | AL133284 | 881 | 1-782 |
| HODFX19 | 191 | 842138 | AC011462 | 882 | 1-745 |
| | | | | | 1096-1314 |
| | | | | | 2617-2717 |
| | | | | | 3158-3842 |
| | | | | | 5564-5805 |
| | | | | | 6037-6404 |
| | | | | | 6761-6817 |
| | | | | | 6951-7090 |
| | | | | | 7229-7499 |
| HODFX19 | 191 | 842138 | AC011462 | 883 | 1-133 |
| HODFX04 | 193 | 926278 | AP001469 | 884 | 1-421 |
| | | | | | 1062-1420 |
| | | | | | 1705-1867 |
| | | | | | 1978-2089 |
| | | | | | 2804-2943 |
| | | | | | 3323-3420 |
| | | | | | 4630-4970 |
| | | | | | 5685-8599 |
| | | | | | 9683-11324 |
| | | | | | 11404-12154 |
| | | | | | 13101-13635 |
| | | | | | 13740-14218 |
| | | | | | 15283-15751 |
| | | | | | 15842-16654 |
| | | | | | 17611-17746 |
| | | | | | 18380-19010 |
| | | | | | 19268-19404 |
| | | | | | 19634-19850 |
| | | | | | 21352-21872 |
| | | | | | 23386-23623 |
| | | | | | 23640-24466 |
| | | | | | 25541-25784 |
| | | | | | 26154-26288 |
| | | | | | 27551-27876 |
| | | | | | 28169-28210 |
| | | | | | 28657-28687 |
| | | | | | 28993-29095 |
| | | | | | 30196-30400 |
| | | | | | 30800-31304 |
| HODFX04 | 193 | 926278 | AP001469 | 885 | 1-465 |
| HODFX04 | 193 | 926278 | AP001469 | 886 | 1-470 |
| HODFW40 | 195 | 859320 | AC008927 | 887 | 1-555 |
| HODFW40 | 195 | 859320 | AC008589 | 888 | 1-555 |
| HODFW40 | 195 | 859320 | AC008779 | 889 | 1-555 |
| HODFW40 | 195 | 859320 | AC008927 | 890 | 1-303 |
| HODFW40 | 195 | 859320 | AC008589 | 891 | 1-303 |
| HODFW40 | 195 | 859320 | AC008779 | 892 | 1-303 |
| HODFR85 | 196 | 783789 | AL356136 | 893 | 1-539 |
| HODFR85 | 196 | 783789 | AC025014 | 894 | 1-1196 |
| HODFR85 | 196 | 783789 | AP001896 | 895 | 1-1199 |
| HODFR85 | 196 | 783789 | AL356136 | 896 | 1-428 |
| HODFR85 | 196 | 783789 | AC025014 | 897 | 1-494 |
| HODFR85 | 196 | 783789 | AP001896 | 898 | 1-494 |
| HODFL37 | 197 | 948703 | AC018620 | 899 | 1-489 |
| HODFL37 | 197 | 948703 | AC018620 | 900 | 1-518 |
| HODFJ11 | 198 | 966065 | AC015896 | 901 | 1-671 |
| | | | | | 1241-1647 |
| HODFJ11 | 198 | 966065 | AC015896 | 902 | 1-935 |
| HODFI66 | 199 | 974317 | AC067831 | 903 | 1-527 |
| HODFI66 | 199 | 974317 | AC063944 | 904 | 1-527 |
| HODFG82 | 201 | 779191 | AC074124 | 905 | 1-553 |
| HODFG82 | 201 | 779191 | AC074124 | 906 | 1-122 |
| HODFD73 | 204 | 909812 | AL050332 | 907 | 1-187 |
| | | | | | 311-458 |
| | | | | | 667-1020 |
| | | | | | 2447-2586 |
| HODFD73 | 204 | 909812 | AL161903 | 908 | 1-187 |
| | | | | | 311-458 |
| | | | | | 667-1020 |
| | | | | | 2448-2587 |
| HODFD73 | 204 | 909812 | AL050332 | 909 | 1-89 |
| HODFC79 | 205 | 774156 | AL354665 | 910 | 1-1880 |
| HODFC79 | 205 | 774156 | AL356112 | 911 | 1-1880 |
| HODFC79 | 205 | 774156 | AL354665 | 912 | 1-504 |
| HODFC79 | 205 | 774156 | AL356112 | 913 | 1-504 |
| HODFC79 | 205 | 774156 | AL354665 | 914 | 1-336 |
| HODEU01 | 207 | 915167 | AC073577 | 915 | 1-1184 |
| HODEU01 | 207 | 915167 | AC073577 | 916 | 1-100 |
| HODET07 | 208 | 952194 | AF129408 | 917 | 1-432 |
| HODET07 | 208 | 952194 | AF129408 | 918 | 1-663 |
| HODES10 | 209 | 963474 | AC004928 | 919 | 1-624 |
| HODES10 | 209 | 963474 | AC004928 | 920 | 1-205 |
| HODEK82 | 211 | 779245 | AC016457 | 921 | 1-782 |
| HODEK82 | 211 | 779245 | AC060231 | 922 | 1-782 |
| HODEK82 | 211 | 779245 | AC022538 | 923 | 1-782 |
| HODEK82 | 211 | 779245 | AC016457 | 924 | 1-453 |
| HODEK82 | 211 | 779245 | AC060231 | 925 | 1-453 |
| HODEK82 | 211 | 779245 | AC022538 | 926 | 1-453 |
| HODEI81 | 212 | 909027 | AL133477 | 927 | 1-691 |
| | | | | | 1035-1582 |
| | | | | | 1947-2121 |
| | | | | | 2587-2815 |
| | | | | | 2947-3258 |
| | | | | | 4523-5586 |
| | | | | | 7715-8024 |
| | | | | | 10082-10281 |
| | | | | | 10288-10324 |
| | | | | | 10530-11581 |
| | | | | | 13722-13912 |
| | | | | | 13988-14123 |
| | | | | | 16111-16268 |
| | | | | | 16627-16912 |
| | | | | | 18881-19016 |
| | | | | | 20590-21205 |
| | | | | | 23084-24618 |
| | | | | | 25847-25904 |
| | | | | | 28119-28387 |
| | | | | | 29843-30572 |
| | | | | | 30682-30930 |
| | | | | | 31188-31321 |
| | | | | | 31341-32366 |
| HODEI81 | 212 | 909027 | AL133477 | 928 | 1-556 |
| HODEI81 | 212 | 909027 | AL133477 | 929 | 1-288 |
| HODEA14 | 213 | 859375 | AC004821 | 930 | 1-100 |
| | | | | | 2352-2466 |
| | | | | | 2802-2941 |
| | | | | | 2960-3163 |
| | | | | | 4980-5083 |
| | | | | | 6842-6968 |
| | | | | | 8774-9008 |
| | | | | | 10405-10540 |
| | | | | | 11412-11517 |
| | | | | | 11577-11682 |
| | | | | | 13279-13409 |
| HODEA14 | 213 | 859375 | AC004821 | 931 | 1-274 |
| HOCPU05 | 214 | 928651 | AL022721 | 932 | 1-1263 |
| | | | | | 6140-6293 |
| | | | | | 8003-8156 |
| | | | | | 9128-9256 |
| | | | | | 9263-10128 |
| | | | | | 11307-11562 |
| | | | | | 13464-13807 |
| | | | | | 14210-14510 |
| | | | | | 15844-17115 |
| | | | | | 17822-19417 |
| | | | | | 20123-20680 |
| | | | | | 21428-21754 |
| | | | | | 25071-25264 |
| | | | | | 25391-25481 |
| | | | | | 25570-25604 |
| | | | | | 30944-31465 |
| | | | | | 34638-34933 |
| | | | | | 35608-35955 |
| | | | | | 36105-36346 |
| | | | | | 38876-39207 |
| | | | | | 44154-44338 |
| | | | | | 44424-44513 |
| | | | | | 44661-45127 |
| | | | | | 45137-45929 |
| HOCPU05 | 214 | 928651 | AL022721 | 933 | 1-117 |
| HOCPH02 | 215 | 917453 | AL359674 | 934 | 1-684 |
| HOCPH02 | 215 | 917453 | AL359674 | 935 | 1-456 |
| HOCPF02 | 216 | 917630 | AL359372 | 936 | 1-1054 |
| | | | | | 2139-2246 |
| | | | | | 4030-4427 |
| | | | | | 6093-6259 |
| HOCPF02 | 216 | 917630 | AL050343 | 937 | 1-1054 |
| | | | | | 2139-2246 |
| | | | | | 4030-4428 |
| | | | | | 6094-6260 |
| HOCPF02 | 216 | 917630 | AL359372 | 938 | 1-31 |
| | | | | | 42-315 |
| HOCPF02 | 216 | 917630 | AL050343 | 939 | 1-274 |
| HOCPF02 | 216 | 917630 | AL050343 | 940 | 1-742 |
| HOCOV07 | 217 | 951744 | AC026974 | 941 | 1-813 |
| HOCOV07 | 217 | 951744 | AL079341 | 942 | 1-813 |
| HOCOV07 | 217 | 951744 | AC026974 | 943 | 1-306 |
| HOCOV07 | 217 | 951744 | AL079341 | 944 | 1-306 |
| HOCMM01 | 218 | 914464 | AC078864 | 945 | 1-954 |
| HOCMM01 | 218 | 914464 | AC019244 | 946 | 1-829 |
| HOCMI24 | 219 | 878363 | AC023046 | 947 | 1-1593 |
| HOCMI24 | 219 | 878363 | AC023046 | 948 | 1-353 |
| HKZAH11 | 221 | 965175 | AL359092 | 949 | 1-116 |
| HKZAH11 | 221 | 965175 | AC009453 | 950 | 1-143 |
| HKZAH11 | 221 | 965175 | AC025036 | 951 | 1-148 |
| HKZAH11 | 221 | 965175 | AC011953 | 952 | 1-126 |
| HKZAH11 | 221 | 965175 | AC022231 | 953 | 1-151 |
| HKZAH11 | 221 | 965175 | AP001451 | 954 | 1-96 |
| HKZAH11 | 221 | 965175 | AC016327 | 955 | 1-165 |
| HKZAH11 | 221 | 965175 | AC048342 | 956 | 1-130 |
| HKZAH11 | 221 | 965175 | AP000562 | 957 | 1-724 |
| HKZAH11 | 221 | 965175 | AC016327 | 958 | 1-195 |
| HKZAH11 | 221 | 965175 | AC048342 | 959 | 1-118 |
| HKZAH11 | 221 | 965175 | AP000562 | 960 | 1-187 |
| HCOPI07 | 224 | 951645 | AC015589 | 961 | 1-501 |
| HCOPI07 | 224 | 951645 | AC010328 | 962 | 1-501 |
| HCOPI07 | 224 | 951645 | AC015589 | 963 | 1-452 |
| HCOPI07 | 224 | 951645 | AC015589 | 964 | 1-309 |
| HCOPI07 | 224 | 951645 | AC010328 | 965 | 1-309 |
| HCOPI07 | 224 | 951645 | AC010328 | 966 | 1-452 |
| HCOPF07 | 225 | 951655 | AL139142 | 967 | 1-687 |
| | | | | | 714-1246 |
| HCOPF07 | 225 | 951655 | AC021635 | 968 | 1-687 |
| | | | | | 714-1246 |
| HCOOF07 | 226 | 951693 | AC000016 | 969 | 1-2256 |
| HCOOF07 | 226 | 951693 | AC025090 | 970 | 1-61 |
| | | | | | 388-1387 |
| | | | | | 4757-5078 |
| | | | | | 5239-5403 |
| | | | | | 5784-6271 |
| | | | | | 6305-9404 |
| HCOOF07 | 226 | 951693 | AC000016 | 971 | 1-2086 |
| HCOOF07 | 226 | 951693 | AC025090 | 972 | 1-426 |
| HCOOF07 | 226 | 951693 | AC000016 | 973 | 1-797 |
| HCOOF07 | 226 | 951693 | AC025090 | 974 | 1-2087 |
| HCONP02 | 227 | 917577 | AC022441 | 975 | 1-1525 |
| | | | | | 1644-2207 |
| HCONP02 | 227 | 917577 | AC008811 | 976 | 1-1268 |
| | | | | | 1387-1950 |
| HCONP02 | 227 | 917577 | AC008831 | 977 | 1-72 |
| | | | | | 1850-1898 |
| | | | | | 1960-2591 |
| | | | | | 3025-3362 |
| | | | | | 3408-3487 |
| | | | | | 3859-4611 |
| | | | | | 4949-5354 |
| | | | | | 5927-6259 |
| | | | | | 7760-8619 |
| | | | | | 9073-9122 |
| | | | | | 10060-10638 |
| | | | | | 10766-11381 |
| | | | | | 12595-12900 |
| | | | | | 14574-15215 |
| | | | | | 17051-17438 |
| | | | | | 18105-18470 |
| | | | | | 18786-19243 |
| | | | | | 19413-20937 |
| | | | | | 21056-21619 |
| HCONP02 | 227 | 917577 | AC022441 | 978 | 1-458 |
| HCONP02 | 227 | 917577 | AC008811 | 979 | 1-458 |
| HCONP02 | 227 | 917577 | AC008831 | 980 | 1-140 |
| HCONM33 | 228 | 971637 | AF196969 | 981 | 1-1043 |
| | | | | | 1119-1879 |
| HCONM33 | 228 | 971637 | AF196969 | 982 | 1-483 |
| HCONM33 | 228 | 971637 | AF196969 | 983 | 1-266 |
| HCBMZ07 | 231 | 951788 | AL049610 | 984 | 1-888 |
| HCBMZ07 | 231 | 951788 | AL049610 | 985 | 1-296 |
| HCBMZ07 | 231 | 951788 | AL049610 | 986 | 1-37 |
| | | | | | 1329-3923 |
| HCBMY10 | 232 | 961718 | AL158048 | 987 | 1-1688 |
| | | | | | 1805-2714 |
| HCBMY10 | 232 | 961718 | AC041046 | 988 | 1-908 |
| HCBMY10 | 232 | 961718 | AC041046 | 989 | 1-112 |
| HCBMY10 | 232 | 961718 | AL158048 | 990 | 1-112 |
| HCBMY10 | 232 | 961718 | AC041046 | 991 | 1-703 |
| HCBMG11 | 233 | 965394 | AC013669 | 992 | 1-181 |
| | | | | | 291-782 |
| | | | | | 2171-2360 |
| | | | | | 2703-3570 |
| | | | | | 4336-4689 |
| | | | | | 5249-5785 |
| | | | | | 5817-6442 |
| | | | | | 6834-7458 |
| HCBMG11 | 233 | 965394 | AC013669 | 993 | 1-487 |
| HBGDA74 | 236 | 832888 | AP001100 | 994 | 1-102 |
| | | | | | 420-643 |
| | | | | | 761-840 |
| | | | | | 1681-1796 |
| | | | | | 1917-2066 |
| | | | | | 2158-2417 |
| | | | | | 3079-3200 |
| | | | | | 3281-3345 |
| | | | | | 3436-4001 |
| | | | | | 4062-4625 |
| HBGDA74 | 236 | 832888 | AP000481 | 995 | 1-64 |
| | | | | | 188-337 |
| | | | | | 429-688 |
| | | | | | 1350-1471 |
| | | | | | 1552-1616 |
| | | | | | 1707-2271 |
| | | | | | 2332-2895 |
| HBGDA74 | 236 | 832888 | AP000481 | 996 | 1-540 |
| | | | | | 1012-1076 |
| | | | | | 1166-1313 |
| | | | | | 1698-1760 |
| | | | | | 1787-1874 |
| | | | | | 1971-2103 |
| | | | | | 2575-2765 |
| | | | | | 3027-3073 |
| HBGDA74 | 236 | 832888 | AP001100 | 997 | 1-540 |
| | | | | | 1012-1076 |
| | | | | | 1166-1198 |
| HBGBG52 | 239 | 522424 | AL136458 | 998 | 1-294 |
| | | | | | 506-707 |
| | | | | | 1776-2011 |
| | | | | | 2535-4755 |
| | | | | | 5405-5870 |
| | | | | | 5873-6187 |
| | | | | | 7245-7361 |
| | | | | | 7501-7967 |
| | | | | | 9091-9694 |
| | | | | | 9825-10069 |
| | | | | | 10913-11066 |
| | | | | | 11815-12127 |
| HBGBG52 | 239 | 522424 | AC069042 | 999 | 1-245 |
| HBGBG52 | 239 | 522424 | AL162739 | 1000 | 1-245 |
| HBGBG52 | 239 | 522424 | AL136458 | 1001 | 1-112 |
| HBGBG52 | 239 | 522424 | AL162739 | 1002 | 1-604 |
| HBGBB78 | 242 | 773930 | AC008403 | 1003 | 1-1630 |
| | | | | | 2058-2480 |
| | | | | | 4161-4577 |
| | | | | | 5334-5745 |
| | | | | | 6732-6865 |
| | | | | | 7024-7163 |
| | | | | | 10746-11227 |
| | | | | | 11908-12229 |
| | | | | | 12481-13862 |
| HBGBB78 | 242 | 773930 | AC008403 | 1004 | 1-482 |
| | | | | | 2074-2191 |
| | | | | | 3067-3427 |
| | | | | | 3514-3666 |
| | | | | | 4176-4250 |
| | | | | | 4718-4839 |
| | | | | | 5313-5692 |
| | | | | | 10395-10491 |
| | | | | | 10694-10779 |
| | | | | | 11107-11256 |
| | | | | | 12127-12209 |
| | | | | | 12283-12405 |
| | | | | | 12543-13031 |
| | | | | | 13771-14040 |
| HBGBB78 | 242 | 773930 | AC008403 | 1005 | 1-128 |
| | | | | | 172-232 |
| | | | | | 1302-2232 |
| HBCPO75 | 244 | 927520 | AC069279 | 1006 | 1-596 |
| | | | | | 4098-4739 |
| | | | | | 5478-5650 |
| | | | | | 6045-6577 |
| | | | | | 6988-7374 |
| HBCPK03 | 245 | 922493 | AC011719 | 1007 | 1-923 |
| HBCPK03 | 245 | 922493 | AP001104 | 1008 | 1-923 |
| HBCPK03 | 245 | 922493 | AP001324 | 1009 | 1-923 |
| HBCJP02 | 246 | 917981 | AP000795 | 1010 | 1-935 |
| | | | | | 1442-2055 |
| | | | | | 2120-2651 |
| HBCJP02 | 246 | 917981 | AC018775 | 1011 | 1-935 |
| | | | | | 1442-2055 |
| | | | | | 2120-2653 |
| HBCJP02 | 246 | 917981 | AC011088 | 1012 | 1-254 |
| | | | | | 1365-1474 |
| | | | | | 2669-2833 |
| | | | | | 3184-3483 |
| | | | | | 3853-4390 |
| | | | | | 9055-9989 |
| | | | | | 10496-11109 |
| | | | | | 11174-11705 |
| | | | | | 14770-14905 |
| | | | | | 15601-16949 |
| | | | | | 24077-24508 |
| | | | | | 25195-25367 |
| | | | | | 27155-27556 |
| | | | | | 28055-28776 |
| | | | | | 29078-30192 |
| | | | | | 35093-35409 |
| | | | | | 37099-37222 |
| | | | | | 37906-38308 |
| | | | | | 39047-39871 |
| | | | | | 40730-41079 |
| | | | | | 41464-41939 |
| | | | | | 42882-44161 |
| HBCJP02 | 246 | 917981 | AC011088 | 1013 | 1-379 |
| HBCJG07 | 247 | 951898 | AL158821 | 1014 | 1-179 |
| | | | | | 415-1143 |
| HBCJG07 | 247 | 951898 | AL158821 | 1015 | 1-401 |
| | | | | | 691-974 |
| | | | | | 1279-2180 |
| HACMR08 | 248 | 955638 | AC012318 | 1016 | 1-147 |
| HACMR08 | 248 | 955638 | AL121844 | 1017 | 1-219 |
| HACMR08 | 248 | 955638 | AC013553 | 1018 | 1-280 |
| | | | | | 2514-2880 |
| | | | | | 3507-3803 |
| | | | | | 5834-5958 |
| | | | | | 8010-8114 |
| | | | | | 9356-9430 |
| | | | | | 13100-13296 |
| | | | | | 14272-14676 |
| | | | | | 14966-15305 |
| | | | | | 15968-16340 |
| | | | | | 16952-17049 |
| | | | | | 17302-17464 |
| | | | | | 18685-19018 |
| | | | | | 19824-20193 |
| | | | | | 20412-20822 |
| | | | | | 21304-21778 |
| | | | | | 22964-23210 |
| | | | | | 23327-23714 |
| | | | | | 24031-24645 |
| | | | | | 24690-24771 |
| | | | | | 26370-27118 |
| HACMR08 | 248 | 955638 | AL121656 | 1019 | 1-2346 |
| | | | | | 2487-3703 |
| | | | | | 3832-4167 |

[0052] Table 1B summarizes additional polynucleotides encompassed by the invention (including cDNA clones related to the sequences (Clone ID NO:Z), contig sequences (contig identifier (Contig ID:) contig nucleotide sequence identifiers (SEQ ID NO:X)), and genomic sequences (SEQ ID NO:B). The first column provides a unique clone identifier, “Clone ID NO:Z”, for a cDNA clone related to each contig sequence. The second column provides the sequence identifier, “SEQ ID NO:X”, for each contig sequence. The third column provides a unique contig identifier, “Contig ID:” for each contig sequence. The fourth column, provides a BAC identifier “BAC ID NO:A” for the BAC clone referenced in the corresponding row of the table. The fifth column provides the nucleotide sequence identifier, “SEQ ID NO:B” for a fragment of the BAC clone identified in column four of the corresponding row of the table. The sixth column, “Exon From-To”, provides the location (i.e., nucleotide position numbers) within the polynucleotide sequence of SEQ ID NO:B which delineate certain polynucleotides of the invention that are also exemplary members of polynucleotide sequences that encode polypeptides of the invention (e.g., polypeptides containing amino acid sequences encoded by the polynucleotide sequences delineated in column six, and fragments and variants thereof).

TABLE 2

| | | SEQ | | | | Score/ | | |
|---|---|---|---|---|---|---|---|---|
| Clone ID | Contig | ID | Analysis | PFam/NR | PFam/NR | Percent | NT | NT |
| NO:Z | ID: | NO:X | Method | Description | Acession Number | Identity | From | To |
| HBCJS08 | 957826 | 11 | blastx.2 | (AK002129) unnamed | dbj\|BAA92096.1\| | 66% | 188 | 346 |
| | | | | protein product | | | | |
| | | | | [Homo sapiens] | | | | |
| HBGBT79 | 525352 | 16 | blastx.2 | Invasin. | dbj\|BAA15799.1\| | 58% | 35 | 331 |
| | | | | [Eseherichia coli] | | 49% | 3 | 209 |
| | | | | | | 87% | 199 | 246 |
| HBGDE85 | 524875 | 18 | blastx.2 | core protein | gb\|AAA24544.1\| | 90% | 1 | 126 |
| | | | | [Escherichia coli] | | | | |
| HBGDT43 | 974223 | 19 | blastx.2 | (AK000496) unnamed | dbj\|BAA91205.1\| | 80% | 445 | 311 |
| | | | | protein product | | | | |
| | | | | [Homo sapiens] | | | | |
| HCBNW02 | 950897 | 20 | blastx.2 | (AC008372) unknown | gb\|AAF23326.1\| | 44% | 1 | 270 |
| | | | | [Homo sapiens] | AC008372_2 | | | |
| HCBOG03 | 922351 | 22 | HMMER | PFAM: Zinc finger, | PF00098 | 6.1 | 95 | 112 |
| | | | 1.8 | CCHC class | | | | |
| HODEX10 | 926260 | 56 | HMMER | PFAM: Helicases | PF00098 | 9.2 | 22 | 54 |
| | | | 1.8 | conserved C-terminal | | | | |
| | | | | domain | | | | |
| HODFQ06 | 934304 | 79 | blastx.2 | (AK000496) unnamed | dbj\|BAA91205.1\| | 48% | 466 | 254 |
| | | | | protein product | | 60% | 537 | 454 |
| | | | | [Homo sapiens] | | | | |
| HODFY16 | 958329 | 87 | HMMER | PFAM: Phorbol esters/ | PF00130 | 3.15 | 175 | 213 |
| | | | 1.8 | diacyiglycerol binding | | | | |
| | | | | domain | | | | |
| HODGC61 | 973449 | 90 | HMMER | PFAM: Protein-tyrosine | PF00102 | 6.61 | 130 | 222 |
| | | | 1.8 | phosphatase | | | | |
| HODGH02 | 917969 | 92 | blastx.2 | IDN4-GGTR14 | sp\|Q9Y6Y5\| | 94% | 17 | 118 |
| | | | | PROTEIN. | Q9Y6Y5 | | | |
| HODGH04 | 926255 | 93 | blastx.2 | IDN4-GGTR14 | sp\|Q9Y6Y5\| | 51% | 8 | 247 |
| | | | | PROTEIN. Q9Y6Y5 | | | | |
| HODGJ67 | 974297 | 97 | blastx.14 | pol gene protein; Xxx | gi\|1196424\|gb\| | 70% | 132 | 284 |
| | | | | [Homo sapiens] | AAA88026.1\| | | | |
| HODGP95 | 908650 | 102 | HMMER | PFAM: Zinc finger, | PF00096 | 18.49 | 209 | 271 |
| | | | 1.8 | C2H2 type | | | | |
| | | | blastx.2 | (AC005498) R31665_1 | gb\|AAC32422.1\| | 61% | 125 | 310 |
| | | | | [Homo sapiens] | | 52% | 146 | 310 |
| | | | | | | 53% | 146 | 292 |
| | | | | | | 41% | 125 | 310 |
| | | | | | | 34% | 74 | 334 |
| | | | | | | 50% | 146 | 307 |
| | | | | | | 51% | 164 | 310 |
| | | | | | | 46% | 164 | 310 |
| | | | | | | 47% | 307 | 357 |
| | | | | | | 47% | 307 | 357 |
| | | | | | | 47% | 307 | 357 |
| | | | | | | 50% | 310 | 357 |
| | | | | | | 35% | 307 | 357 |
| | | | | | | 41% | 307 | 357 |
| HODGQ22 | 974290 | 104 | blastx.2 | hypothetical protein | pir\|S72489\| | 47% | 235 | 2 |
| | | | | Tigger 2—human | S72489 | 57% | 287 | 231 |
| | | | | transposon MER37 1 | | | | |
| HODGQ92 | 894368 | 106 | HMMER | PFAM: RhoGAP domain | PF00620 | 30.1 | 2 | 124 |
| | | | 2.1.1 | | | | | |
| | | | blastx.2 | (AC002398) F25965_3 | gb\|AAB81198.1\| | 63% | 142 | 399 |
| | | | | [Homo sapiens] | | 72% | 2 | 133 |
| HPDRG92 | 967704 | 132 | blastx.14 | 2-oxoglutarate | gi\|531241\|dbj\| | 82% | 7 | 234 |
| | | | | dehydrogenase precursor | BAA8801393.1\| | 73% | 237 | 326 |
| | | | | [Homo sapiens] | | 35% | 1 | 60 |
| | | | | | | 75% | 279 | 302 |
| HVCAZ38 | 969208 | 137 | blastx.2 | (AK000496) unnamed | dbj\|BAA91205.1\| | 64% | 395 | 159 |
| | | | | protein product | | 75% | 151 | 110 |
| | | | | [Homo sapiens] | | | | |
| HVVBY08 | 957658 | 148 | HMMER | PFAM: Sm protein | PF01423 | 79.4 | 134 | 355 |
| | | | 2.1.1 | | | | | |
| | | | blastx.14 | (AC005258) R30783_1 | gi\|848985\|gb\| | 97% | 185 | 403 |
| | | | | [Homo sapiens] | AAC25622.1\| | 100% | 130 | 195 |
| HPCTD03 | 922149 | 165 | HMMER | PFAM: Pterin 4 alpha | PF01329 | 143.1 | 6 | 305 |
| | | | 2.1.1 | carbinolamine | | | | |
| | | | | dehydratase | | | | |
| | | | blastx. 14 | pterin-4a-carbinolamine | gi\|848985\|gb\| | 62% | 18 | 311 |
| | | | | dehydratase | AAA69662.1\| | | | |
| | | | | [Homo sapiens] | | | | |
| HPCOV68 | 911075 | 169 | blastx.14 | (AC004500) GDF-9 | gi\|2996640\|gb\| | 64% | 2 | 160 |
| | | | | [Homo sapiens] | AAC084 50.1\| | | | |
| HOOKF04 | 925784 | 172 | blastx.14 | (AF092091) cp431 | gi\|3851160\|gb\| | 94% | 2 | 157 |
| | | | | [Rattus norvegicus] | AAC72234.1\| | 94% | 158 | 265 |
| | | | | | | 29% | 5 | 127 |
| | | | | | | 27% | 5 | 115 |
| HOOJN04 | 925783 | 174 | blastx.14 | (AF011336) putative E1-- | gi\|2944187\|gb\| | 100% | 4 | 153 |
| | | | | E2 ATPase | AAC05245.1\| | | | |
| | | | | [Mus musculus] | | | | |
| HODFF88 | 974911 | 202 | HMMER | PFAM: Eukaryotic | PF00069 | 101.43 | 98 | 370 |
| | | | 1.8 | protein kinase domain | | | | |
| | | | blastx.14 | mixed-lineage protein | pir\|S32467\| | 74% | 131 | 493 |
| | | | | kinase 1—human | JU0229 | 81% | 763 | 921 |
| | | | | | | 30% | 751 | 915 |
| HODFD73 | 909812 | 204 | HMMER | PFAM: GTPase-activator | PF00616 | 34 | 190 | 390 |
| | | | 2.1.1 | protein for Ras-like | | | | |
| | | | | GTPase | | | | |
| | | | blastx.14 | (AB016962) synGAP-b1 | gi\|4417207\|dbj\| | 98% | 4 | 480 |
| | | | | [Rattus norvegicus] | BAA74972.1\| | | | |
| HODEI81 | 909027 | 212 | HMMER | PFAM: Zinc finger, | PF00096 | 34.54 | 297 | 365 |
| | | | 1.8 | type | | | | |
| | | | blastx.2 | zinc regulatory factor | dbj\|BAA22262.1\| | 58% | 273 | 401 |
| | | | | [Homo sapiens] | | | | |
| HOCPH02 | 917453 | 215 | HMMER | PFAM: Zinc finger, | PF00097 | 8.27 | 265 | 309 |
| | | | 1.8 | C3HC4 type (RING | | | | |
| | | | | finger) | | | | |
| HCOMM05 | 925952 | 229 | HMMER | PFAM: Src homolog | PF00018 | 59.48 | 178 | 342 |
| | | | 1.8 | domain 3 | | | | |
| | | | blastx.2 | epidermal growth factor | gb\|AAA62280.1\| | 46% | 445 | 840 |
| | | | | receptor kinase substrate | | 43% | 115 | 435 |
| | | | | [Homo sapiens] | | 23% | 43 | 222 |
| HBGDF39 | 861602 | 235 | HMMER | PFAM: Response | PF00072 | 44.82 | 158 | 355 |
| | | | 1.8 | regulator receiver domain | | | | |
| HBCPV80 | 932817 | 243 | HMMER | PFAM: WW domain | PF00397 | 64.2 | 71 | 160 |
| | | | 2.1.1 | | | | | |

[0053] Table 2 further characterizes certain encoded polypeptides of the invention, by providing the results of comparisons to protein and protein family databases. The first column provides a unique clone identifier, “Clone ID NO:”, corresponding to a cDNA clone disclosed in Table 1A. The second column provides the unique contig indentifier, “Contig ID:” which allows correlation with the information in Table 1A. The third column provides the sequence identifier, “SEQ ID NO:X”, for the contig polynucleotide sequences. The fourth column provides the analysis method by which the homology/identity disclosed in the row was determined. The fifth column provides a description of PFam/NR hits having significant matches identified by each analysis. Column six provides the accession number of the PFam/NR hit disclosed in the fifth column. Column seven, “Score/Percent Identity”, provides a quality score or the percent identity, of the hit disclosed in column five. Comparisons were made between polypeptides encoded by polynucleotides of the invention and a non-redundant protein database (herein referred to as “NR”), or a database of protein families (herein referred to as “PFam”), as described below.

[0054] The NR database, which comprises the NBRF PIR database, the NCBI GenPept database, and the SIB SwissProt and TrEMBL databases, was made non-redundant using the computer program nrdb2 (Warren Gish, Washington University in Saint Louis). Each of the polynucleotides shown in Table 1A, column 3 (e.g., SEQ ID NO:X or the ‘Query’ sequence) was used to search against the NR database. The computer program BLASTX was used to compare a 6-frame translation of the Query sequence to the NR database (for information about the BLASTX algorithm please see Altshul et al., J. Mol. Biol. 215:403-410 (1990), and Gish et al., Nat. Genet. 3:266-272 (1993)). A description of the sequence that is most similar to the Query sequence (the highest scoring ‘Subject’) is shown in column five of Table 2 and the database accession number for that sequence is provided in column six. The highest scoring ‘Subject’ is reported in Table 2 if (a) the estimated probability that the match occurred by chance alone is less than 1.0e-07, and (b) the match was not to a known repetitive element. BLASTX returns alignments of short polypeptide segments of the Query and Subject sequences which share a high degree of similarity; these segments are known as High-Scoring Segment Pairs or HSPs. Table 2 reports the degree of similarity between the Query and the Subject for each HSP as a percent identity in Column 7. The percent identity is determined by dividing the number of exact matches between the two aligned sequences in the HSP, dividing by the number of Query amino acids in the HSP and multiplying by 100. The polynucleotides of SEQ ID NO:X which encode the polypeptide sequence that generates an HSP are delineated by columns 8 and 9 of Table 2.

[0055] The PFam database, PFam version 5.2, (Sonnhammer et al., Nucl. Acids Res., 26:320-322, (1998)) consists of a series of multiple sequence alignments; one alignment for each protein family. Each multiple sequence alignment is converted into a probability model called a Hidden Markov Model, or HMM, that represents the position-specific variation among the sequences that make up the multiple sequence alignment (see, e.g., R. Durbin et al., Biological sequence analysis: probabilistic models of proteins and nucleic acids, Cambridge University Press, 1998 for the theory of HMMs). The program HMMER version 1.8 (Sean Eddy, Washington University in Saint Louis) was used to compare the predicted protein sequence for each Query sequence (SEQ ID NO:Y in Table 1A) to each of the HMMs derived from PFam version 5.2. A HMM derived from PFam version 5.2 was said to be a significant match to a polypeptide of the invention if the score returned by HMMER 1.8 was greater than 0.8 times the HMMER 1.8 score obtained with the most distantly related known member of that protein family. The description of the PFam family which shares a significant match with a polypeptide of the invention is listed in column 5 of Table 2, and the database accession number of the PFam hit is provided in column 6. Column 7 provides the score returned by HMMER version 1.8 for the alignment. Columns 8 and 9 delineate the polynucleotides of SEQ ID NO:X which encode the polypeptide sequence which shows a significant match to a PFam protein family.

[0056] As mentioned, columns 8 and 9 in Table 2, “NT From” and “NT To”, delineate the polynucleotides of “SEQ ID NO:X” that encode a polypeptide having a significant match to the PFam/NR database as disclosed in the fifth column of Table 2. In one embodiment, the invention provides a protein comprising, or alternatively consisting of, a polypeptide encoded by the polynucleotides of SEQ ID NO:X delineated in columns 8 and 9 of Table 2. Also provided are polynucleotides encoding such proteins, and the complementary strand thereto.

[0057] The nucleotide sequence SEQ ID NO:X and the translated SEQ ID NO:Y are sufficiently accurate and otherwise suitable for a variety of uses well known in the art and described further below. For instance, the nucleotide sequences of SEQ ID NO:X are useful for designing nucleic acid hybridization probes that will detect nucleic acid sequences contained in SEQ ID NO:X or the cDNA contained in Clone ID NO:Z. These probes will also hybridize to nucleic acid molecules in biological samples, thereby enabling immediate applications in chromosome mapping, linkage analysis, tissue identification and/or typing, and a variety of forensic and diagnostic methods of the invention. Similarly, polypeptides identified from SEQ ID NO:Y may be used to generate antibodies which bind specifically to these polypeptides, or fragments thereof, and/or to the polypeptides encoded by the cDNA clones identified in, for example, Table 1A.

[0058] Nevertheless, DNA sequences generated by sequencing reactions can contain sequencing errors. The errors exist as misidentified nucleotides, or as insertions or deletions of nucleotides in the generated DNA sequence. The erroneously inserted or deleted nucleotides cause frame shifts in the reading frames of the predicted amino acid sequence. In these cases, the predicted amino acid sequence diverges from the actual amino acid sequence, even though the generated DNA sequence may be greater than 99.9% identical to the actual DNA sequence (for example, one base insertion or deletion in an open reading frame of over 1000 bases).

[0059] Accordingly, for those applications requiring precision in the nucleotide sequence or the amino acid sequence, the present invention provides not only the generated nucleotide sequence identified as SEQ ID NO:X, and a predicted translated amino acid sequence identified as SEQ ID NO:Y, but also a sample of plasmid DNA containing cDNA Clone ID NO:Z (deposited with the ATCC on Oct. 5, 2000, and receiving ATCC designation numbers PTA 2574 and PTA 2575; deposited with the ATCC on Jan. 5, 2001, having the depositor reference numbers TS-1, TS-2, AC-1, and AC-2; and/or as set forth, for example, in Table 1A, 6 and 7). The nucleotide sequence of each deposited clone can readily be determined by sequencing the deposited clone in accordance with known methods. Further, techniques known in the art can be used to verify the nucleotide sequences of SEQ ID NO:X.

[0060] The predicted amino acid sequence can then be verified from such deposits. Moreover, the amino acid sequence of the protein encoded by a particular clone can also be directly determined by peptide sequencing or by expressing the protein in a suitable host cell containing the deposited human cDNA, collecting the protein, and determining its sequence.

[0061] RACE Protocol for Recovery of Full-Length Genes

[0062] Partial cDNA clones can be made full-length by utilizing the rapid amplification of cDNA ends (RACE) procedure described in Frohman, M. A., et al., Proc. Nat'l. Acad. Sci. USA, 85:8998-9002 (1988). A cDNA clone missing either the 5′ or 3′ end can be reconstructed to include the absent base pairs extending to the translational start or stop codon, respectively. In some cases, cDNAs are missing the start codon of translation. The following briefly describes a modification of this original 5′ RACE procedure. Poly A+ or total RNA is reverse transcribed with Superscript II (Gibco/BRL) and an antisense or complementary primer specific to the cDNA sequence. The primer is removed from the reaction with a Microcon Concentrator (Amicon). The first-strand cDNA is then tailed with dATP and terminal deoxynucleotide transferase (Gibco/BRL). Thus, an anchor sequence is produced which is needed for PCR amplification. The second strand is synthesized from the dA-tail in PCR buffer, Taq DNA polymerase (Perkin-Elmer Cetus), an oligo-dT primer containing three adjacent restriction sites (XhoI, SalI and ClaI) at the 5′ end and a primer containing just these restriction sites. This double-stranded cDNA is PCR amplified for 40 cycles with the same primers as well as a nested cDNA-specific antisense primer. The PCR products are size-separated on an ethidium bromide-agarose gel and the region of gel containing cDNA products the predicted size of missing protein-coding DNA is removed. cDNA is purified from the agarose with the Magic PCR Prep kit (Promega), restriction digested with XhoI or SalI, and ligated to a plasmid such as pBluescript SKII (Stratagene) at XhoI and EcoRV sites. This DNA is transformed into bacteria and the plasmid clones sequenced to identify the correct protein-coding inserts. Correct 5′ ends are confirmed by comparing this sequence with the putatively identified homologue and overlap with the partial CDNA clone. Similar methods known in the art and/or commercial kits are used to amplify and recover 3′ ends.

[0063] Several quality-controlled kits are commercially available for purchase. Similar reagents and methods to those above are supplied in kit form from Gibco/BRL for both 5′ and 3′ RACE for recovery of full length genes. A second kit is available from Clontech which is a modification of a related technique, SLIC (single-stranded ligation to single-stranded CDNA), developed by Dumas et al., Nucleic Acids Res., 19:5227-32 (1991). The major differences in procedure are that the RNA is alkaline hydrolyzed after reverse transcription and RNA ligase is used to join a restriction site-containing anchor primer to the first-strand cDNA. This obviates the necessity for the dA-tailing reaction which results in a polyT stretch that is difficult to sequence past.

[0064] An alternative to generating 5′ or 3′ cDNA from RNA is to use CDNA library double-stranded DNA. An asymmetric PCR-amplified antisense CDNA strand is synthesized with an antisense cDNA-specific primer and a plasmid-anchored primer. These primers are removed and a symmetric PCR reaction is performed with a nested cDNA-specific antisense primer and the plasmid-anchored primer.

[0065] RNA Ligase Protocol for Generating the 5′ or 3′ End Sequences to Obtain Full Length Genes

[0066] Once a gene of interest is identified, several methods are available for the identification of the 5′ or 3′ portions of the gene which may not be present in the original cDNA plasmid. These methods include, but are not limited to, filter probing, clone enrichment using specific probes and protocols similar and identical to 5′ and 3′ RACE. While the full length gene may be present in the library and can be identified by probing, a useful method for generating the 5′ or 3′ end is to use the existing sequence information from the original cDNA to generate the missing information. A method similar to 5′ RACE is available for generating the missing 5′ end of a desired full-length gene. (This method was published by Fromont-Racine et al., Nucleic Acids Res., 21(7):1683-1684 (1993)). Briefly, a specific RNA oligonucleotide is ligated to the 5′ ends of a population of RNA presumably containing full-length gene RNA transcript. A primer set containing a primer specific to the ligated RNA oligonucleotide and a primer specific to a known sequence of the gene of interest, is used to PCR amplify the 5′ portion of the desired full length gene which may then be sequenced and used to generate the full length gene. This method starts with total RNA isolated from the desired source, poly A RNA may be used but is not a prerequisite for this procedure. The RNA preparation may then be treated with phosphatase if necessary to eliminate 5′ phosphate groups on degraded or damaged RNA, which may interfere with the later RNA ligase step. The phosphatase, if used, is then inactivated and the RNA is treated with tobacco acid pyrophosphatase in order to remove the cap structure present at the 5′ ends of messenger RNAs. This reaction leaves a 5′ phosphate group at the 5′ end of the cap cleaved RNA which can then be ligated to an RNA oligonucleotide using T4 RNA ligase. This modified RNA preparation can then be used as a template for first strand cDNA synthesis using a gene specific oligonucleotide. The first strand synthesis reaction can then be used as a template for PCR amplification of the desired 5′ end using a primer specific to the ligated RNA oligonucleotide and a primer specific to the known sequence of the ovarian and/or breast cancer antigen of interest. The resultant product is then sequenced and analyzed to confirm that the 5′ end sequence belongs to the relevant ovarian and/or breast cancer antigen.

[0067] The present invention also relates to vectors or plasmids, which include such DNA sequences, as well as the use of the DNA sequences. The material deposited with the ATCC (deposited with the ATCC on Oct. 5, 2000, and receiving ATCC designation numbers PTA 2574 and PTA 2575; deposited with the ATCC on Jan. 5, 2001, having the depositor reference numbers TS-1, TS-2, AC-1, and AC-2; and/or as set forth, for example, in Table 1A, 6 and 7) is a mixture of cDNA clones derived from a variety of human tissue and cloned in either a plasmid vector or a phage vector, as shown, for example, in Table 7. These deposits are referred to as “the deposits” herein. The tissues from which some of the clones were derived are listed in Table 7, and the vector in which the corresponding cDNA is contained is also indicated in Table 7. The deposited material includes cDNA clones corresponding to SEQ ID NO:X described, for example, in Table 1A (Clone ID NO:Z). A clone which is isolatable from the ATCC Deposits by use of a sequence listed as SEQ ID NO:X, may include the entire coding region of a human gene or in other cases such clone may include a substantial portion of the coding region of a human gene. Furthermore, although the sequence listing may in some instances list only a portion of the DNA sequence in a clone included in the ATCC Deposits, it is well within the ability of one skilled in the art to sequence the DNA included in a clone contained in the ATCC Deposits by use of a sequence (or portion thereof) described in, for example Tables 1AA or 2 by procedures hereinafter further described, and others apparent to those skilled in the art.

[0068] Also provided in Table 7 is the name of the vector which contains the cDNA clone. Each vector is routinely used in the art. The following additional information is provided for convenience.

[0069] Vectors Lambda Zap (U.S. Pat. Nos. 5,128,256 and 5,286,636), Uni-Zap XR (U.S. Pat. Nos. 5,128,256 and 5,286,636), Zap Express (U.S. Pat. Nos. 5,128,256 and 5,286,636), pBluescript (pBS) (Short, J. M. et al., Nucleic Acids Res. 16:7583-7600 (1988); Alting-Mees, M. A. and Short, J. M., Nucleic Acids Res. 17.9494 (1989)) and pBK (Alting-Mees, M. A. et al., Strategies 5:58-61 (1992)) are commercially available from Stratagene Cloning Systems, Inc., 11011 N. Torrey Pines Road, La Jolla, Calif., 92037. pBS contains an ampicillin resistance gene and pBK contains a neomycin resistance gene. Phagemid pBS may be excised from the Lambda Zap and Uni-Zap XR vectors, and phagemid pBK may be excised from the Zap Express vector. Both phagemids may be transformed into E. coli strain XL-1 Blue, also available from Stratagene.

[0070] Vectors pSport1, pCMVSport 1.0, pCMVSport 2.0 and pCMVSport 3.0, were obtained from Life Technologies, Inc., P. O. Box 6009, Gaithersburg, Md. 20897. All Sport vectors contain an ampicillin resistance gene and may be transformed into E. coli strain DH10B, also available from Life Technologies. See, for instance, Gruber, C. E., et al., Focus 15:59-(1993). Vector lafmid BA (Bento Soares, Columbia University, New York, N.Y.) contains an ampicillin resistance gene and can be transformed into E. coli strain XL-1 Blue. Vector pCR®2.1, which is available from Invitrogen, 1600 Faraday Avenue, Carlsbad, Calif. 92008, contains an ampicillin resistance gene and may be transformed into E. coli strain DH10B, available from Life Technologies. See, for instance, Clark, J. M., Nuc. Acids Res. 16:9677-9686 (1988 ) and Mead, D. et al., Bio/Technology 9: (1991).

[0071] The present invention also relates to the genes corresponding to SEQ ID NO:X, SEQ ID NO:Y, and/or the deposited clone (Clone ID NO:Z). The corresponding gene can be isolated in accordance with known methods using the sequence information disclosed herein. Such methods include preparing probes or primers from the disclosed sequence and identifying or amplifying the corresponding gene from appropriate sources of genomic material.

[0072] Also provided in the present invention are allelic variants, orthologs, and/or species homologs. Procedures known in the art can be used to obtain full-length genes, allelic variants, splice variants, full-length coding portions, orthologs, and/or species homologs of ovarian and/or breast cancer associated genes corresponding to SEQ ID NO:X or the complement thereof, polypeptides encoded by SEQ ID NO:X or the complement thereof, and/or the cDNA contained in Clone ID NO:Z, using information from the sequences disclosed herein or the clones deposited with the ATCC. For example, allelic variants and/or species homologs may be isolated and identified by making suitable probes or primers from the sequences provided herein and screening a suitable nucleic acid source for allelic variants and/or the desired homologue.

[0073] The polypeptides of the invention can be prepared in any suitable manner. Such polypeptides include isolated naturally occurring polypeptides, recombinantly produced polypeptides, synthetically produced polypeptides, or polypeptides produced by a combination of these methods. Means for preparing such polypeptides are well understood in the art.

[0074] The polypeptides may be in the form of the secreted protein, including the mature form, or may be a part of a larger protein, such as a fusion protein (see below). It is often advantageous to include an additional amino acid sequence which contains secretory or leader sequences, pro-sequences, sequences which aid in purification, such as multiple histidine residues, or an additional sequence for stability during recombinant production.

[0075] The polypeptides of the present invention are preferably provided in an isolated form, and preferably are substantially purified. A recombinantly produced version of a polypeptide, including the secreted polypeptide, can be substantially purified using techniques described herein or otherwise known in the art, such as, for example, by the one-step method described in Smith and Johnson, Gene 67:31-40 (1988). Polypeptides of the invention also can be purified from natural, synthetic or recombinant sources using techniques described herein or otherwise known in the art, such as, for example, antibodies of the invention raised against the ovarian and/or breast cancer polypeptides of the present invention in methods which are well known in the art.

[0076] The present invention provides a polynucleotide comprising, or alternatively consisting of, the nucleic acid sequence of SEQ ID NO:X, and/or the cDNA sequence contained in Clone ID NO:Z. The present invention also provides a polypeptide comprising, or alternatively, consisting of, the polypeptide sequence of SEQ ID NO:Y, a polypeptide encoded by SEQ ID NO:X or a complement thereof, a polypeptide encoded by the cDNA contained in Clone ID NO:Z, and/or the polypeptide sequence encoded by a nucleotide sequence in SEQ ID NO:B as defined in column 6 of Table 1B. Polynucleotides encoding a polypeptide comprising, or alternatively consisting of the polypeptide sequence of SEQ ID NO:Y, a polypeptide encoded by SEQ ID NO:X, a polypeptide encoded by the cDNA contained in Clone ID NO:Z and/or a polypeptide sequence encoded by a nucleotide sequence in SEQ ID NO:B as defined in column 6 of Table 1B are also encompassed by the invention. The present invention further encompasses a polynucleotide comprising, or alternatively consisting of, the complement of the nucleic acid sequence of SEQ ID NO:X, a nucleic acid sequence encoding a polypeptide encoded by the complement of the nucleic acid sequence of SEQ ID NO:X, and/or the cDNA contained in Clone ID NO:Z.

[0077] Moreover, representative examples of polynucleotides of the invention comprise, or alternatively consist of, one, two, three, four, five, six, seven, eight, nine, ten, or more of the sequences delineated in Table 1B column 6, or any combination thereof. Additional, representative examples of polynucleotides of the invention comprise, or alternatively consist of, one, two, three, four, five, six, seven, eight, nine, ten, or more of the complementary strand(s) of the sequences delineated in Table 1B column 6, or any combination thereof. In further embodiments, the above-described polynucleotides of the invention comprise, or alternatively consist of, sequences delineated in Table 1B, column 6, and have a nucleic acid sequence which is different from that of the BAC fragment having the sequence disclosed in SEQ ID NO:B (see Table 1B, column 5). In additional embodiments, the above-described polynucleotides of the invention comprise, or alternatively consist of, sequences delineated in Table 1B, column 6, and have a nucleic acid sequence which is different from that published for the BAC clone identified as BAC ID NO:A (see Table 1B, column 4). In additional embodiments, the above-described polynucleotides of the invention comprise, or alternatively consist of, sequences delineated in Table 1B, column 6, and have a nucleic acid sequence which is different from that contained in the BAC clone identified as BAC ID NO:A (see Table 1B, column 4). Polypeptides encoded by these polynucleotides, other polynucleotides that encode these polypeptides, and antibodies that bind these polypeptides are also encompassed by the invention. Additionally, fragments and variants of the above-described polynucleotides and polypeptides are also encompassed by the invention.

[0078] Further, representative examples of polynucleotides of the invention comprise, or alternatively consist of, one, two, three, four, five, six, seven, eight, nine, ten, or more of the sequences delineated in column 6 of Table 1B which correspond to the same Clone ID NO:Z (see Table 1B, column 1), or any combination thereof. Additional, representative examples of polynucleotides of the invention comprise, or alternatively consist of, one, two, three, four, five, six, seven, eight, nine, ten, or more of the complementary strand(s) of the sequences delineated in column 6 of Table 1B which correspond to the same Clone ID NO:Z (see Table 1B, column 1), or any combination thereof. In further embodiments, the above-described polynucleotides of the invention comprise, or alternatively consist of, sequences delineated in column 6 of Table 1B which correspond to the same Clone ID NO:Z (see Table 1B, column 1) and have a nucleic acid sequence which is different from that of the BAC fragment having the sequence disclosed in SEQ ID NO:B (see Table 1B, column 5). In additional embodiments, the above-described polynucleotides of the invention comprise, or alternatively consist of, sequences delineated in column 6 of Table 1B which correspond to the same Clone ID NO:Z (see Table 1B, column 1) and have a nucleic acid sequence which is different from that published for the BAC clone identified as BAC ID NO:A (see Table 1B, column 4). In additional embodiments, the above-described polynucleotides of the invention comprise, or alternatively consist of, sequences delineated in column 6 of Table 1B which correspond to the same Clone ID NO:Z (see Table 1B, column 1) and have a nucleic acid sequence which is different from that contained in the BAC clone identified as BAC ID NO:A (see Table 1B, column 4). Polypeptides encoded by these polynucleotides, other polynucleotides that encode these polypeptides, and antibodies that bind these polypeptides are also encompassed by the invention. Additionally, fragments and variants of the above-described polynucleotides and polypeptides are also encompassed by the invention.

[0079] Further, representative examples of polynucleotides of the invention comprise, or alternatively consist of, one, two, three, four, five, six, seven, eight, nine, ten, or more of the sequences delineated in column 6 of Table 1B which correspond to the same contig sequence identifer SEQ ID NO:X (see Table 1B, column 2), or any combination thereof. Additional, representative examples of polynucleotides of the invention comprise, or alternatively consist of, one, two, three, four, five, six, seven, eight, nine, ten, or more of the complementary strand(s) of the sequences delineated in column 6 of Table 1B which correspond to the same contig sequence identifer SEQ ID NO:X (see Table 1B, column 2), or any combination thereof. In further embodiments, the above-described polynucleotides of the invention comprise, or alternatively consist of, sequences delineated in column 6 of Table 1B which correspond to the same contig sequence identifer SEQ ID NO:X (see Table 1B, column 2) and have a nucleic acid sequence which is different from that of the BAC fragment having the sequence disclosed in SEQ ID NO:B (see Table 1B, column 5). In additional embodiments, the above-described polynucleotides of the invention comprise, or alternatively consist of, sequences delineated in column 6 of Table 1B which correspond to the same contig sequence identifer SEQ ID NO:X (see Table 1B, column 2) and have a nucleic acid sequence which is different from that published for the BAC clone identified as BAC ID NO:A (see Table 1B, column 4). In additional embodiments, the above-described polynucleotides of the invention comprise, or alternatively consist of, sequences delineated in column 6 of Table 1B which correspond to the same contig sequence identifer SEQ ID NO:X (see Table 1B, column 2) and have a nucleic acid sequence which is different from that contained in the BAC clone identified as BAC ID NO:A (See Table 1B, column 4). Polypeptides encoded by these polynucleotides, other polynucleotides that encode these polypeptides, and antibodies that bind these polypeptides are also encompassed by the invention. Additionally, fragments and variants of the above-described polynucleotides and polypeptides are also encompassed by the invention.

[0080] Moreover, representative examples of polynucleotides of the invention comprise, or alternatively consist of, one, two, three, four, five, six, seven, eight, nine, ten, or more of the sequences delineated in the same row of Table 1B column 6, or any combination thereof. Additional, representative examples of polynucleotides of the invention comprise, or alternatively consist of, one, two, three, four, five, six, seven, eight, nine, ten, or more of the complementary strand(s) of the sequences delineated in the same row of Table 1B column 6, or any combination thereof. In preferred embodiments, the polynucteotides of the invention comprise, or alternatively consist of, one, two, three, four, five, six, seven, eight, nine, ten, or more of the complementary strand(s) of the sequences delineated in the same row of Table 1B column 6, wherein sequentially delineated sequences in the table (i.e. corresponding to those exons located closest to each other) are directly contiguous in a 5′ to 3′ orientation. In further embodiments, above-described polynucleotides of the invention comprise, or alternatively consist of, sequences delineated in the same row of Table 1B, column 6, and have a nucleic acid sequence which is different from that of the BAC fragment having the sequence disclosed in SEQ ID NO:B (see Table 1B, column 5). In additional embodiments, the above-described polynucleotides of the invention comprise, or alternatively consist of, sequences delineated in the same row of Table 1B, column 6, and have a nucleic acid sequence which is different from that published for the BAC clone identified as BAC ID NO:A (see Table 1B, column 4). In additional embodiments, the above-described polynucleotides of the invention comprise, or alternatively consist of, sequences delineated in the same row of Table 1B, column 6, and have a nucleic acid sequence which is different from that contained in the BAC clone identified as BAC ID NO:A (see Table 1B, column 4). Polypeptides encoded by these polynucleotides, other polynucleotides that encode these polypeptides, and antibodies that bind these polypeptides are also encompassed by the invention.

[0081] In additional specific embodiments, polynucleotides of the invention comprise, or alternatively consist of, one, two, three, four, five, six, seven, eight, nine, ten, or more of the sequences delineated in column 6 of Table 1B, and the polynucleotide sequence of SEQ ID NO:X (e.g., as defined in Table 1B, column 2) or fragments or variants thereof. Polypeptides encoded by these polynucleotides, other polynucleotides that encode these polypeptides, and antibodies that bind these polypeptides are also encompassed by the invention.

[0082] In additional specific embodiments, polynucleotides of the invention comprise, or alternatively consist of, one, two, three, four, five, six, seven, eight, nine, ten, or more of the sequences delineated in column 6 of Table 1B which correspond to the same Clone ID NO:Z (see Table 1B, column 1), and the polynucleotide sequence of SEQ ID NO:X (e.g., as defined in Table 1A or 1B) or fragments or variants thereof. In preferred embodiments, the delineated sequence(s) and polynucleotide sequence of SEQ ID NO:X correspond to the same Clone ID NO:Z. Polypeptides encoded by these polynucleotides, other polynucleotides that encode these polypeptides, and antibodies that bind these polypeptides are also encompassed by the invention.

[0083] In further specific embodiments, polynucleotides of the invention comprise, or alternatively consist of, one, two, three, four, five, six, seven, eight, nine, ten, or more of the sequences delineated in the same row of column 6 of Table 1B, and the polynucleotide sequence of SEQ ID NO:X (e.g., as defined in Table 1A or 1B) or fragments or variants thereof. In preferred embodiments, the delineated sequence(s) and polynucleotide sequence of SEQ ID NO:X correspond to the same row of column 6 of Table 1B. Polypeptides encoded by these polynucleotides, other polynucleotides that encode these polypeptides, and antibodies that bind these polypeptides are also encompassed by the invention.

[0084] In additional specific embodiments, polynucleotides of the invention comprise, or alternatively consist of a polynucleotide sequence in which the 3′ 10 polynucleotides of one of the sequences delineated in column 6 of Table 1B and the 5′ 10 polynucleotides of the sequence of SEQ ID NO:X are directly contiguous. Nucleic acids which hybridize to the complement of these 20 contiguous polynucleotides under stringent hybridization conditions or alternatively, under lower stringency conditions, are also encompassed by the invention. Polypeptides encoded by these polynucleotides and/or nucleic acids, other polynucleotides and/or nucleic acids that encode these polypeptides, and antibodies that bind these polypeptides are also encompassed by the invention. Additionally, fragments and variants of the above-described polynucleotides, nucleic acids, and polypeptides are also encompassed by the invention.

[0085] In additional specific embodiments, polynucleotides of the invention comprise, or alternatively consist of, a polynucleotide sequence in which the 3′ 10 polynucleotides of one of the sequences delineated in column 6 of Table 1B and the 5′ 10 polynucleotides of a fragment or variant of the sequence of SEQ ID NO:X are directly contiguous Nucleic acids which hybridize to the complement of these 20 contiguous polynucleotides under stringent hybridization conditions or alternatively, under lower stringency conditions, are also encompassed by the invention. Polypeptides encoded by these polynucleotides and/or nucleic acids, other polynucleotides and/or nucleic acids encoding these polypeptides, and antibodies that bind these polypeptides are also encompassed by the invention. Additionally, fragments and variants of the above-described polynucleotides, nucleic acids, and polypeptides are also encompassed by the invention.

[0086] In specific embodiments, polynucleotides of the invention comprise, or alternatively consist of, a polynucleotide sequence in which the 3′ 10 polynucleotides of the sequence of SEQ ID NO:X and the 5′ 10 polynucleotides of the sequence of one of the sequences delineated in column 6 of Table 1B are directly contiguous. Nucleic acids which hybridize to the complement of these 20 contiguous polynucleotides under stringent hybridization conditions or alternatively, under lower stringency conditions, are also encompassed by the invention. Polypeptides encoded by these polynucleotides and/or nucleic acids, other polynucleotides and/or nucleic acids encoding these polypeptides, and antibodies that bind these polypeptides are also encompassed by the invention. Additionally, fragments and variants of the above-described polynucleotides, nucleic acids, and polypeptides are also encompassed by the invention.

[0087] In specific embodiments, polynucleotides of the invention comprise, or alternatively consist of, a polynucleotide sequence in which the 3′ 10 polynucleotides of a fragment or variant of the sequence of SEQ ID NO:X and the 5′ 10 polynucleotides of the sequence of one of the sequences delineated in column 6 of Table 1B are directly contiguous. Nucleic acids which hybridize to the complement of these 20 contiguous polynucleotides under stringent hybridization conditions or alternatively, under lower stringency conditions, are also encompassed by the invention. Polypeptides encoded by these polynucleotides and/or nucleic acids, other polynucleotides and/or nucleic acids encoding these polypeptides, and antibodies that bind these polypeptides are also encompassed by the invention. Additionally, fragments and variants of the above-described polynucleotides, nucleic acids, and polypeptides, are also encompassed by the invention.

[0088] In further specific embodiments, polynucleotides of the invention comprise, or alternatively consist of, a polynucleotide sequence in which the 3′ 10 polynucleotides of one of the sequences delineated in column 6 of Table 1B and the 5′ 10 polynucleotides of another sequence in column 6 are directly contiguous. Nucleic acids which hybridize to the complement of these 20 contiguous polynucleotides under stringent hybridization conditions or alternatively, under lower stringency conditions, are also encompassed by the invention. Polypeptides encoded by these polynucleotides and/or nucleic acids, other polynucleotides and/or nucleic acids encoding these polypeptides, and antibodies that bind these polypeptides are also encompassed by the invention. Additionally, fragments and variants of the above-described polynucleotides, nucleic acids, and polypeptides are also encompassed by the invention.

[0089] In specific embodiments, polynucleotides of the invention comprise, or alternatively consist of, a polynucleotide sequence in which the 3′ 10 polynucleotides of one of the sequences delineated in column 6 of Table 1B and the 5′ 10 polynucleotides of another sequence in column 6 corresponding to the same Clone ID NO:Z (see Table 1B, column 1) are directly contiguous. Nucleic acids which hybridize to the complement of these 20 lower stringency conditions, are also encompassed by the invention. Polypeptides encoded by these polynucleotides and/or nucleic acids, other polynucleotides and/or nucleic acids encoding these polypeptides, and antibodies that bind these polypeptides are also encompassed by the invention. Additionally, fragments and variants of the above-described polynucleotides, nucleic acids, and polypeptides are also encompassed by the invention.

[0090] In specific embodiments, polynucleotides of the invention comprise, or alternatively consist of, a polynucleotide sequence in which the 3′ 10 polynucleotides of one sequence in column 6 corresponding to the same contig sequence identifer SEQ ID NO:X (see Table 1B, column 2) are directly contiguous. Nucleic acids which hybridize to the complement of these 20 contiguous polynucleotides under stringent hybridization conditions or alternatively, under lower stringency conditions, are also encompassed by the invention. Polypeptides encoded by these polynucleotides and/or nucleic acids, other polynucleotides and/or nucleic acids encoding these polypeptides, and antibodies that bind these polypeptides are also encompassed by the invention. Additionally, fragments and variants of the above-described polynucleotides, nucleic acids, and polypeptides are also encompassed by the invention.

[0091] In specific embodiments, polynucleotides of the invention comprise, or alternatively consist of a polynucleotide sequence in which the 3′ 10 polynucleotides of one of the sequences delineated in column 6 of Table 1B and the 5′ 10 polynucleotides of another sequence in column 6 corresponding to the same row are directly contiguous. In preferred embodiments, the 3′ 10 polynucleotides of one of the sequences delineated in column 6 of Table 1B is directly contiguous with the 5′ 10 polynucleotides of the next sequential exon delineated in Table 1B, column 6. Nucleic acids which hybridize to the complement of these 20 contiguous polynucleotides under stringent hybridization conditions or alternatively, under lower stringency conditions, are also encompassed by the invention. Polypeptides encoded by these polynucleotides and/or nucleic acids, other polynucleotides and/or nucleic acids encoding these polypeptides, and antibodies that bind these polypeptides are also encompassed by the invention. Additionally, fragments and variants of the above-described polynucleotides, nucleic acids, and polypeptides are also encompassed by the invention.

[0092] Many polynucleotide sequences, such as EST sequences, are publicly available and accessible through sequence databases and may have been publicly available prior to conception of the present invention. Preferably, such related polynucleotides are specifically excluded from the scope of the present invention. Accordingly, for each contig sequence (SEQ ID NO:X) listed in the third column of Table 1A, preferably excluded are one or more polynucleotides comprising a nucleotide sequence described by the general formula of a-b, where a is any integer between 1 and the final nucleotide minus 15 of SEQ ID NO:X, b is an integer of 15 to the final nucleotide of SEQ ID NO:X, where both a and b correspond to the positions of nucleotide residues shown in SEQ ID NO:X, and where b is greater than or equal to a +14. More specifically, preferably excluded are one or more polynucleotides comprising a nucleotide sequence described by the general formula of a-b, where a and b are integers as defined in columns 4 and 5, respectively, of Table 3. In specific embodiments, the polynucleotides of the invention do not consist of at least one, two, three, four, five, ten, or more of the specific polynucleotide sequences referenced by the Genbank Accession No. as disclosed in column 6 of Table 3 (including for example, published sequence in connection with a particular BAC clone). In further embodiments, preferably excluded from the invention are the specific polynucleotide sequence(s) contained in the clones corresponding to at least one, two, three, four, five, ten, or more of the available material having the accession numbers identified in the sixth column of this Table (including for example, the actual sequence contained in an identified BAC clone). In no way is this listing meant to encompass all of the sequences which may be excluded by the general formula, it is just a representative example. All references available through these accessions are hereby incorporated by reference in their entirety.

TABLE 3

| | SEQ | | | | |
|---|---|---|---|---|---|
| | ID | | EST Disclaimer | | |
| Clone ID | NO: | Contig | Range | Range | |
| NO:Z | X | ID: | of a | of b | Acession #'s |

| | | | | | | | | | | |
|---|---|---|---|---|---|---|---|---|---|---|
| HBCJS08 | 11 | 957826 | 1-492 | 15-506 | AL119483, | | | | | |
| | | | | | AA809125, | | | | | |
| | | | | | AL119444, | | | | | |
| | | | | | AA835346, | | | | | |
| | | | | | AA188940, | | | | | |
| | | | | | AC016027, | | | | | |
| | | | | | AC016830, | | | | | |
| | | | | | AC005529, | | | | | |
| | | | | | AC005261, | | | | | |
| | | | | | AC005255, | | | | | |
| | | | | | AC006137, | | | | | |
| | | | | | AC006080, | | | | | |
| | | | | | AL049874, | | | | | |
| | | | | | AL132777, L44140, | | | | | |
| | | | | | AL031983, | | | | | |
| | | | | | AC006515, | | | | | |
| | | | | | AC004659, Z85987, | | | | | |
| | | | | | AC005531, | | | | | |
| | | | | | AF134726, | | | | | |
| | | | | | AC006441, | | | | | |
| | | | | | AC004858, | | | | | |
| | | | | | AF053356, AP000552, | | | | | |
| | | | | | AC005740, | | | | | |
| | | | | | AP000503, | | | | | |
| | | | | | AC012627, | | | | | |
| | | | | | AC004882, | | | | | |
| | | | | | AC003108, | | | | | |
| | | | | | AC007934, | | | | | |
| | | | | | AL049758, | | | | | |
| | | | | | AC005181, | | | | | |
| | | | | | AF109907, | | | | | |
| | | | | | AC004033, | | | | | |
| | | | | | AC005091, | | | | | |
| | | | | | AC007685, | | | | | |
| | | | | | AC005971, | | | | | |
| | | | | | AC003663, | | | | | |
| | | | | | AC005274, | | | | | |
| | | | | | AC005089, | | | | | |
| | | | | | AL049829, | | | | | |
| | | | | | AC006449, | | | | | |
| | | | | | U96629, AC004973, | | | | | |
| | | | | | AL049872, | | | | | |
| | | | | | AC007283, | | | | | |
| | | | | | AC005057, | | | | | |
| | | | | | AC004231, | | | | | |
| | | | | | AL035413, | | | | | |
| | | | | | AL078638, | | | | | |
| | | | | | AC006023, | | | | | |
| | | | | | AC005815, | | | | | |
| | | | | | AL031311, | | | | | |
| | | | | | AC005821, | | | | | |
| | | | | | AL049780, | | | | | |
| | | | | | AL031228, | | | | | |
| | | | | | AC005919, | | | | | |
| | | | | | AP000555, | | | | | |
| | | | | | AL049631, | | | | | |
| | | | | | AC004895, | | | | | |
| | | | | | AC005072, | | | | | |
| | | | | | AC005736, | | | | | |
| | | | | | AL021155, | | | | | |
| | | | | | AL021155, | | | | | |
| | | | | | AL022165, | | | | | |
| | | | | | AL022165, | | | | | |
| | | | | | AL133448, | | | | | |
| | | | | | AL133245, | | | | | |
| | | | | | AC007055, | | | | | |
| | | | | | AL008718, | | | | | |
| | | | | | AC004526, | | | | | |
| | | | | | AC007065, | | | | | |
| | | | | | AL049776, U07563, | | | | | |
| | | | | | AL035681, | | | | | |
| | | | | | AP000114, | | | | | |
| | | | | | AP000114, AP000046, | | | | | |
| | | | | | AF205588, | | | | | |
| | | | | | AC005231, | | | | | |
| | | | | | AC005841, | | | | | |
| | | | | | AC004491, | | | | | |
| | | | | | AC007193, | | | | | |
| | | | | | AC007878, | | | | | |
| | | | | | AL031591, | | | | | |
| | | | | | AF038458, | | | | | |
| | | | | | AL049869, | | | | | |
| | | | | | AC012384, | | | | | |
| | | | | | AC003002, | | | | | |
| | | | | | AL133485, | | | | | |
| | | | | | AL109984, | | | | | |
| | | | | | AC004983, | | | | | |
| | | | | | AL121653, | | | | | |
| | | | | | AC005049, | | | | | |
| | | | | | AC005839, | | | | | |
| | | | | | AC002418, | | | | | |
| | | | | | AC004386, D84401, | | | | | |
| | | | | | AC003037, | | | | | |
| | | | | | AC002091, | | | | | |
| | | | | | AL049538, | | | | | |
| | | | | | AC002070, | | | | | |
| | | | | | AF045555, Z93244, | | | | | |
| | | | | | AC006468, | | | | | |
| | | | | | AL022316, | | | | | |
| | | | | | AC006141, | | | | | |
| | | | | | AC004854, | | | | | |
| | | | | | AC005067, | | | | | |
| | | | | | AC005768, | | | | | |
| | | | | | AC007993, | | | | | |
| | | | | | AL008719, | | | | | |
| | | | | | AC004522, | | | | | |
| | | | | | AC004099, | | | | | |
| | | | | | AC006512, | | | | | |
| | | | | | AC005088, | | | | | |
| | | | | | AC004884, | | | | | |
| | | | | | AL031427, | | | | | |
| | | | | | AD000092, | | | | | |
| | | | | | AC005624, | | | | | |
| | | | | | AL109758, Z70281, | | | | | |
| | | | | | AC004859, | | | | | |
| | | | | | AC005081, | | | | | |
| | | | | | AL079295, | | | | | |
| | | | | | AC002425, | | | | | |
| | | | | | AB026898, | | | | | |
| | | | | | AC004985, | | | | | |
| | | | | | AL035072, | | | | | |
| | | | | | AC005484, | | | | | |
| | | | | | AC004816, | | | | | |
| | | | | | AC005914, | | | | | |
| | | | | | AL121754, | | | | | |
| | | | | | AC004890, | | | | | |
| | | | | | AC005746, | | | | | |
| | | | | | AL121757, Z86090, | | | | | |
| | | | | | AL109627, | | | | | |
| | | | | | AL133163, | | | | | |
| | | | | | AC000003, | | | | | |
| | | | | | AC009721, Z82250, | | | | | |
| | | | | | AC007057, | | | | | |
| | | | | | and AC005071. | | | | | |
| HBCQJ03 | 12 | 922401 | 1-124 | 15-138 | AW392670, Z99396, | | | | | |
| | | | | | AL119319, | | | | | |
| | | | | | AL036418, | | | | | |
| | | | | | AL036858, | | | | | |
| | | | | | AL372827, | | | | | |
| | | | | | AW384394, | | | | | |
| | | | | | AL119457, | | | | | |
| | | | | | AL119483, | | | | | |
| | | | | | AL119324, | | | | | |
| | | | | | AW363220, | | | | | |
| | | | | | AL119484, | | | | | |
| | | | | | AL119391, | | | | | |
| | | | | | AL119497, | | | | | |
| | | | | | AL119522, U46351, | | | | | |
| | | | | | AL119418, | | | | | |
| | | | | | AL119355, | | | | | |
| | | | | | AL119443, | | | | | |
| | | | | | AL119363, | | | | | |
| | | | | | AL037094, | | | | | |
| | | | | | AL119341, U46341, | | | | | |
| | | | | | AL134902, | | | | | |
| | | | | | AL119396, U46349, | | | | | |
| | | | | | AL119401, U46350, | | | | | |
| | | | | | U46347, AL042551, | | | | | |
| | | | | | AL037205, | | | | | |
| | | | | | AL119335, | | | | | |
| | | | | | AL119496, | | | | | |
| | | | | | AL119439, | | | | | |
| | | | | | AL134536, | | | | | |
| | | | | | AL036196, | | | | | |
| | | | | | AL037082, | | | | | |
| | | | | | AL119444, | | | | | |
| | | | | | AL134525, | | | | | |
| | | | | | AL036268, U46346, | | | | | |
| | | | | | AL038837, | | | | | |
| | | | | | AL042614, | | | | | |
| | | | | | AL134920, | | | | | |
| | | | | | AL043019, | | | | | |
| | | | | | AL042984, | | | | | |
| | | | | | AL037051, | | | | | |
| | | | | | AL042965, | | | | | |
| | | | | | AL042975, | | | | | |
| | | | | | AL036725, | | | | | |
| | | | | | AL042544, | | | | | |
| | | | | | AA631969, | | | | | |
| | | | | | AL119399, | | | | | |
| | | | | | AL134538, U46345, | | | | | |
| | | | | | AL042542, | | | | | |
| | | | | | AL043029, | | | | | |
| | | | | | AL042450, | | | | | |
| | | | | | AL043003, | | | | | |
| | | | | | AL036924, | | | | | |
| | | | | | AL037526, | | | | | |
| | | | | | AL119464, | | | | | |
| | | | | | AR066494, | | | | | |
| | | | | | AR060234, A81671, | | | | | |
| | | | | | AB026436, | | | | | |
| | | | | | AD001527, | | | | | |
| | | | | | AR054110, | | | | | |
| | | | | | AR023813, | | | | | |
| | | | | | AR064707, | | | | | |
| | | | | | and AR069079. | | | | | |
| HBCQS90 | 13 | 951787 | 1-507 | 15-521 | AA191298, | | | | | |
| | | | | | AW364854, | | | | | |
| | | | | | AI205727, R16601, | | | | | |
| | | | | | and AI188004. | | | | | |
| HBGBD28 | 14 | 525846 | 1-314 | 15-328 | | | | | | |
| HBGBS07 | 15 | 954299 | 1-403 | 15-417 | AA229977, N41881, | | | | | |
| | | | | | N23545, H78888, | | | | | |
| | | | | | H54240, A5270016, | | | | | |
| | | | | | and AA569612. | | | | | |
| HBGBT79 | 16 | 525352 | 1-318 | 15-332 | | | | | | |
| HBGDA44 | 17 | 525618 | 1-493 | 15-507 | | | | | | |
| HBGDE85 | 18 | 524875 | 1-125 | 15-139 | | | | | | |
| HBGDT43 | 19 | 974223 | 1-433 | 15-447 | AI567076, | | | | | |
| | | | | | AW270343, | | | | | |
| | | | | | AA169263, | | | | | |
| | | | | | AW275510, | | | | | |
| | | | | | AI801482, AA362511, | | | | | |
| | | | | | AI933534, AA847499, | | | | | |
| | | | | | AA580808, | | | | | |
| | | | | | AA226363, | | | | | |
| | | | | | AA502104, AI311927, | | | | | |
| | | | | | AA569471, | | | | | |
| | | | | | AL042753, | | | | | |
| | | | | | AL048925, | | | | | |
| | | | | | AA502860, AI133297, | | | | | |
| | | | | | AI499588, | | | | | |
| | | | | | AW021583, | | | | | |
| | | | | | AA531079, | | | | | |
| | | | | | AW248819, F25733, | | | | | |
| | | | | | AW341900, | | | | | |
| | | | | | AA101689, R86151, | | | | | |
| | | | | | AA494102, | | | | | |
| | | | | | AA482923, | | | | | |
| | | | | | AA715255, | | | | | |
| | | | | | AA715267, | | | | | |
| | | | | | AA516222, | | | | | |
| | | | | | AA758934, AI783494, | | | | | |
| | | | | | AA602047, AI751216, | | | | | |
| | | | | | AA664909, T60681, | | | | | |
| | | | | | AA320966, | | | | | |
| | | | | | AL119691, | | | | | |
| | | | | | AA428792, | | | | | |
| | | | | | AA828042, AI445674, | | | | | |
| | | | | | AW062724, | | | | | |
| | | | | | AA493695, | | | | | |
| | | | | | AW302013, | | | | | |
| | | | | | AA469451, AI281881, | | | | | |
| | | | | | AW193461, | | | | | |
| | | | | | AI919265, AA484679, | | | | | |
| | | | | | AA632612, AI085719, | | | | | |
| | | | | | AA601202, | | | | | |
| | | | | | AA653375, | | | | | |
| | | | | | AA491862, | | | | | |
| | | | | | AA713891, AI687343, | | | | | |
| | | | | | AA491650, AI584186, | | | | | |
| | | | | | AA468456, | | | | | |
| | | | | | AA757775, | | | | | |
| | | | | | AW438643, | | | | | |
| | | | | | AL036037, | | | | | |
| | | | | | AA577959, AI873990, | | | | | |
| | | | | | AA568869, | | | | | |
| | | | | | AA515334, | | | | | |
| | | | | | AA668807, | | | | | |
| | | | | | AA508359, AI872020, | | | | | |
| | | | | | AW023990, | | | | | |
| | | | | | AA643455, AI282511, | | | | | |
| | | | | | AA658362, | | | | | |
| | | | | | AA724333, H73082, | | | | | |
| | | | | | AI538870, | | | | | |
| | | | | | AW073060, | | | | | |
| | | | | | AA908687, | | | | | |
| | | | | | AA487621, | | | | | |
| | | | | | AA493621, | | | | | |
| | | | | | AA620467, | | | | | |
| | | | | | AI471887, AI368256, | | | | | |
| | | | | | AI240168, AI345157, | | | | | |
| | | | | | AL038705, | | | | | |
| | | | | | AA683238, AI568678, | | | | | |
| | | | | | H71429, AA662225, | | | | | |
| | | | | | AA470969, AI797903, | | | | | |
| | | | | | AA488746, | | | | | |
| | | | | | AA719292, | | | | | |
| | | | | | AA846952, | | | | | |
| | | | | | AA804925, | | | | | |
| | | | | | AW084466, F27407 | | | | | |
| | | | | | AA837791, AI589461, | | | | | |
| | | | | | AA747594, AI933299, | | | | | |
| | | | | | AI564454, AI924872, | | | | | |
| | | | | | AA572713, AI708139, | | | | | |
| | | | | | AA490183, | | | | | |
| | | | | | AA019312, AI583283, | | | | | |
| | | | | | AI054343, AL042547, | | | | | |
| | | | | | AW274349, | | | | | |
| | | | | | AA811153, | | | | | |
| | | | | | AA446544, F17555, | | | | | |
| | | | | | AA368059, | | | | | |
| | | | | | AW050498, | | | | | |
| | | | | | AI338350, AA478355, | | | | | |
| | | | | | AA773472, | | | | | |
| | | | | | AA634889, | | | | | |
| | | | | | AA502155, | | | | | |
| | | | | | AA665021, AI247199, | | | | | |
| | | | | | AI559251, R02632, | | | | | |
| | | | | | AA484373, | | | | | |
| | | | | | AW050734, | | | | | |
| | | | | | AW235497, R40056, | | | | | |
| | | | | | AW193265, | | | | | |
| | | | | | AW273218, | | | | | |
| | | | | | AW021207, | | | | | |
| | | | | | AI472222, AA633753, | | | | | |
| | | | | | AW408047, | | | | | |
| | | | | | AW303196, | | | | | |
| | | | | | AI350211, | | | | | |
| | | | | | AW301809, | | | | | |
| | | | | | AA668639, | | | | | |
| | | | | | AA584581, | | | | | |
| | | | | | AA573725, | | | | | |
| | | | | | AW247819, | | | | | |
| | | | | | AI669453, AA805846, | | | | | |
| | | | | | T06754, T09071, | | | | | |
| | | | | | AA623002, | | | | | |
| | | | | | AW104030, | | | | | |
| | | | | | AA806796, | | | | | |
| | | | | | AA773902, | | | | | |
| | | | | | AA577906, AI625647, | | | | | |
| | | | | | AA515909, AI521679, | | | | | |
| | | | | | AW302903, | | | | | |
| | | | | | AA483223, AI801600, | | | | | |
| | | | | | AA581903, | | | | | |
| | | | | | AW075948, | | | | | |
| | | | | | AI692808, AA503600, | | | | | |
| | | | | | AI284640, AI589230, | | | | | |
| | | | | | AI744995, AI860013, | | | | | |
| | | | | | AW407578, | | | | | |
| | | | | | AA629874, | | | | | |
| | | | | | AW327868, | | | | | |
| | | | | | AI702314, AA181823, | | | | | |
| | | | | | AA704009, | | | | | |
| | | | | | AA189117, | | | | | |
| | | | | | AA743716, | | | | | |
| | | | | | AL135377, | | | | | |
| | | | | | AL044858, | | | | | |
| | | | | | AI859742, AA179944, | | | | | |
| | | | | | AI110844, AI110770, | | | | | |
| | | | | | AW300625, | | | | | |
| | | | | | AI754658, | | | | | |
| | | | | | AL119984, | | | | | |
| | | | | | AI354388, AI285576, | | | | | |
| | | | | | AI873852, AI903462, | | | | | |
| | | | | | AA487417, N64587, | | | | | |
| | | | | | AW131155, | | | | | |
| | | | | | AW301350, | | | | | |
| | | | | | AA578861, | | | | | |
| | | | | | AA493708, | | | | | |
| | | | | | AW196064, | | | | | |
| | | | | | AI241821, | | | | | |
| | | | | | AL119166, T74382, | | | | | |
| | | | | | AI807762, AI381253, | | | | | |
| | | | | | AA828767, AI656840, | | | | | |
| | | | | | AA501615, | | | | | |
| | | | | | AA758366, | | | | | |
| | | | | | AL078634, U82671, | | | | | |
| | | | | | AP000569, AP000301, | | | | | |
| | | | | | AC006255, | | | | | |
| | | | | | AP000114, AP000045, | | | | | |
| | | | | | AC005668, | | | | | |
| | | | | | AC007556, | | | | | |
| | | | | | AC007878, | | | | | |
| | | | | | AC005191, | | | | | |
| | | | | | AF085954, | | | | | |
| | | | | | AC005089, | | | | | |
| | | | | | AC005261, | | | | | |
| | | | | | AL133276, U67827, | | | | | |
| | | | | | X75335, AC006571, | | | | | |
| | | | | | Z68278, AF039906, | | | | | |
| | | | | | AL022320, | | | | | |
| | | | | | AL049758, | | | | | |
| | | | | | AC007286, | | | | | |
| | | | | | AC012599, | | | | | |
| | | | | | AC004230, | | | | | |
| | | | | | AC002310, | | | | | |
| | | | | | AC005385, U62317, | | | | | |
| | | | | | Z97053, AC004112, | | | | | |
| | | | | | AL022316, | | | | | |
| | | | | | AC010200, | | | | | |
| | | | | | AC002091, | | | | | |
| | | | | | AL031283, | | | | | |
| | | | | | AF107885, | | | | | |
| | | | | | AC005284, | | | | | |
| | | | | | AC005406, Z84484, | | | | | |
| | | | | | AL049776, Z98949, | | | | | |
| | | | | | AC005295, | | | | | |
| | | | | | AL078603, L29074, | | | | | |
| | | | | | AL049853, | | | | | |
| | | | | | AC005296, | | | | | |
| | | | | | U67825, X55929, | | | | | |
| | | | | | M22900, AC004076, | | | | | |
| | | | | | AL050348, | | | | | |
| | | | | | AL049736, | | | | | |
| | | | | | AL022725, | | | | | |
| | | | | | AB014079, | | | | | |
| | | | | | AD000833, | | | | | |
| | | | | | AL121778, U29953, | | | | | |
| | | | | | Z82245, Z69713, | | | | | |
| | | | | | AF002993, | | | | | |
| | | | | | Z92845, AL133494, | | | | | |
| | | | | | AC005306, U76377, | | | | | |
| | | | | | Z92846, AC006139, | | | | | |
| | | | | | AC002384, | | | | | |
| | | | | | AL022311, | | | | | |
| | | | | | AF104455, | | | | | |
| | | | | | AC007033, | | | | | |
| | | | | | AP000339, AF157623, | | | | | |
| | | | | | AP000326, | | | | | |
| | | | | | AL008728, | | | | | |
| | | | | | AC004389, | | | | | |
| | | | | | AF038458, AF095725, | | | | | |
| | | | | | AP000054, AP000169, | | | | | |
| | | | | | AP000123, AP000495, | | | | | |
| | | | | | AP000122, AP000217, | | | | | |
| | | | | | AL022717, | | | | | |
| | | | | | AC005162, | | | | | |
| | | | | | AC004991, | | | | | |
| | | | | | AP000345, | | | | | |
| | | | | | AC003686, | | | | | |
| | | | | | AC004842, | | | | | |
| | | | | | AC004150, | | | | | |
| | | | | | AC004466, | | | | | |
| | | | | | AF196972, | | | | | |
| | | | | | AL035696, | | | | | |
| | | | | | AP000689, | | | | | |
| | | | | | AL031588, | | | | | |
| | | | | | AL049557, | | | | | |
| | | | | | AC005589, | | | | | |
| | | | | | AL049697, Z85986, | | | | | |
| | | | | | AP000346, | | | | | |
| | | | | | AC005837, | | | | | |
| | | | | | AL022721, | | | | | |
| | | | | | AC006529, | | | | | |
| | | | | | AC009399, | | | | | |
| | | | | | AC005028, | | | | | |
| | | | | | AC004554, | | | | | |
| | | | | | AP000493, | | | | | |
| | | | | | AC005071, | | | | | |
| | | | | | AC005332, | | | | | |
| | | | | | AC006042, | | | | | |
| | | | | | X55931, AC011625, | | | | | |
| | | | | | AL049545, D63507, | | | | | |
| | | | | | AF067122, | | | | | |
| | | | | | AC003108, | | | | | |
| | | | | | AC005765, | | | | | |
| | | | | | AC007792, | | | | | |
| | | | | | AC000070, | | | | | |
| | | | | | AC005514, | | | | | |
| | | | | | AC005920, | | | | | |
| | | | | | AC007297, | | | | | |
| | | | | | AC006312, | | | | | |
| | | | | | AC002316, | | | | | |
| | | | | | AC004161, U95739, | | | | | |
| | | | | | AL023575, Z95113, | | | | | |
| | | | | | AL110502, | | | | | |
| | | | | | AC006538, | | | | | |
| | | | | | AP000517, | | | | | |
| | | | | | AC007567, | | | | | |
| | | | | | AL021977, D83989, | | | | | |
| | | | | | U18390, X55932, | | | | | |
| | | | | | AC003029, | | | | | |
| | | | | | AL109799, | | | | | |
| | | | | | AC005193, | | | | | |
| | | | | | AC002119, | | | | | |
| | | | | | AL049759, | | | | | |
| | | | | | AL035252, Z22650, | | | | | |
| | | | | | D83737, AC004615, | | | | | |
| | | | | | AC007364, | | | | | |
| | | | | | AF001298, | | | | | |
| | | | | | AB003151, Z69666, | | | | | |
| | | | | | U75285, AC005745, | | | | | |
| | | | | | AL022168, Z54146, | | | | | |
| | | | | | AP000298, | | | | | |
| | | | | | AC004693, Z68869, | | | | | |
| | | | | | AB023052, Z69838, | | | | | |
| | | | | | Z54334, AF015723, | | | | | |
| | | | | | Z97634, Z82976, | | | | | |
| | | | | | AC007787, | | | | | |
| | | | | | AC006138, | | | | | |
| | | | | | AC004152, | | | | | |
| | | | | | AC004678, | | | | | |
| | | | | | AC004490, | | | | | |
| | | | | | AC005790, | | | | | |
| | | | | | AC008975, | | | | | |
| | | | | | AF006752, | | | | | |
| | | | | | AC004036, | | | | | |
| | | | | | AC005620, | | | | | |
| | | | | | AC002314, | | | | | |
| | | | | | AF039907, | | | | | |
| | | | | | AC002984, | | | | | |
| | | | | | AC005175, | | | | | |
| | | | | | AC004205, | | | | | |
| | | | | | AC007565, | | | | | |
| | | | | | AC004210, | | | | | |
| | | | | | AC007229, | | | | | |
| | | | | | AL049856, | | | | | |
| | | | | | AP000401, | | | | | |
| | | | | | AC003960, | | | | | |
| | | | | | AC005781, | | | | | |
| | | | | | AC005619, | | | | | |
| | | | | | AL080242, | | | | | |
| | | | | | AP000261, | | | | | |
| | | | | | AL031273, | | | | | |
| | | | | | AC006388, | | | | | |
| | | | | | AC006561, | | | | | |
| | | | | | AC005072, | | | | | |
| | | | | | AF146367, | | | | | |
| | | | | | AC002390, | | | | | |
| | | | | | AC004455, | | | | | |
| | | | | | AC004650, | | | | | |
| | | | | | AC004901, | | | | | |
| | | | | | AC004024, Z99569, | | | | | |
| | | | | | AL096794, | | | | | |
| | | | | | AC004149, Z97988, | | | | | |
| | | | | | Z97196, AC002559, | | | | | |
| | | | | | AP000246, | | | | | |
| | | | | | AL024474, | | | | | |
| | | | | | AF190465, | | | | | |
| | | | | | AL008710, | | | | | |
| | | | | | AL031594, | | | | | |
| | | | | | AL022240, | | | | | |
| | | | | | AP000035, AP000044, | | | | | |
| | | | | | AP000112, AP000513, | | | | | |
| | | | | | AP000100, AP000159, | | | | | |
| | | | | | AP000017, AP000508, | | | | | |
| | | | | | AC004522, | | | | | |
| | | | | | AL050341, Z99916 | | | | | |
| | | | | | AC006004, | | | | | |
| | | | | | AC002115, | | | | | |
| | | | | | AC004584, | | | | | |
| | | | | | AL009051, | | | | | |
| | | | | | AF124523, | | | | | |
| | | | | | AC006037, | | | | | |
| | | | | | AC004226, | | | | | |
| | | | | | AL050401, | | | | | |
| | | | | | AC007242, | | | | | |
| | | | | | AL049699, | | | | | |
| | | | | | AC006539, | | | | | |
| | | | | | AC002468, | | | | | |
| | | | | | AC005532, | | | | | |
| | | | | | AC010209, | | | | | |
| | | | | | AC004815, | | | | | |
| | | | | | AC006458, | | | | | |
| | | | | | AC003982, | | | | | |
| | | | | | AC005996, | | | | | |
| | | | | | AC005045, | | | | | |
| | | | | | AL031295, | | | | | |
| | | | | | AC005247, | | | | | |
| | | | | | AC006019, | | | | | |
| | | | | | AC004933, Z97056, | | | | | |
| | | | | | AL034561, | | | | | |
| | | | | | AC005244, | | | | | |
| | | | | | AL078624, | | | | | |
| | | | | | AF118808, AF207550, | | | | | |
| | | | | | AC007228, | | | | | |
| | | | | | and AC004883. | | | | | |
| HCBNW02 | 20 | 950897 | 1-508 | 15-522 | | | | | | |
| HCBNW07 | 21 | 951820 | 1-415 | 15-429 | AI419479, AI084317, | | | | | |
| | | | | | AW072920, | | | | | |
| | | | | | AI350149, AA847656, | | | | | |
| | | | | | AA931572, AI423647 | | | | | |
| | | | | | AI983432, AI056162, | | | | | |
| | | | | | AA826926, AI478982, | | | | | |
| | | | | | T50766, C00534, | | | | | |
| | | | | | and AC005803. | | | | | |
| HCBOG03 | 22 | 922351 | 1-469 | 15-483 | | | | | | |
| HCOOG04 | 23 | 925748 | 1-104 | 15-118 | AI922923. | | | | | |
| HCOOI07 | 24 | 951665 | 1-710 | 15-724 | | | | | | |
| HCOOM77 | 25 | 969161 | 1-502 | 15-516 | | | | | | |
| HCOQE11 | 26 | 965299 | 1-825 | 15-839 | AI554514, | | | | | |
| | | | | | AW117613, | | | | | |
| | | | | | AA401269, | | | | | |
| | | | | | AA894442, | | | | | |
| | | | | | AI923609, AA968468, | | | | | |
| | | | | | AA779787, W56250, | | | | | |
| | | | | | AI049682, AI342711, | | | | | |
| | | | | | AI277156, AA424469, | | | | | |
| | | | | | AA443257, | | | | | |
| | | | | | AW023482, | | | | | |
| | | | | | AI978942, AI611714, | | | | | |
| | | | | | AL132777, and | | | | | |
| | | | | | AB024689. | | | | | |
| HCOQHI2 | 27 | 969151 | 1-551 | 15-565 | AA683227, H65257, | | | | | |
| | | | | | Z99396, AW392670, | | | | | |
| | | | | | AW372827, | | | | | |
| | | | | | AL119497, | | | | | |
| | | | | | AL134531, U46341, | | | | | |
| | | | | | AW384394, AL119457, | | | | | |
| | | | | | AL119483, | | | | | |
| | | | | | AL119418, | | | | | |
| | | | | | AL119324, | | | | | |
| | | | | | AL119522, | | | | | |
| | | | | | AL119319, | | | | | |
| | | | | | AW363220, | | | | | |
| | | | | | AL119396, | | | | | |
| | | | | | AL038837, | | | | | |
| | | | | | AL119484, | | | | | |
| | | | | | AL119391, U46350, | | | | | |
| | | | | | AL119341, | | | | | |
| | | | | | AL119443, U46349, | | | | | |
| | | | | | AL037051, | | | | | |
| | | | | | AL036725, | | | | | |
| | | | | | U46351, AL119335, | | | | | |
| | | | | | AL119363, | | | | | |
| | | | | | AL119355, | | | | | |
| | | | | | AL119496, | | | | | |
| | | | | | AL036418, | | | | | |
| | | | | | AA631969, | | | | | |
| | | | | | U46347, AL043029, | | | | | |
| | | | | | AL042989, | | | | | |
| | | | | | AL119401, | | | | | |
| | | | | | AL134920, | | | | | |
| | | | | | AL134533, | | | | | |
| | | | | | AL036924, | | | | | |
| | | | | | AL042970, | | | | | |
| | | | | | AL119488, | | | | | |
| | | | | | AL119439, | | | | | |
| | | | | | AL042965, | | | | | |
| | | | | | AL134528, | | | | | |
| | | | | | AI142139, | | | | | |
| | | | | | AL042975, | | | | | |
| | | | | | AL043033, | | | | | |
| | | | | | AL119444, | | | | | |
| | | | | | AL043011, | | | | | |
| | | | | | AL037205, | | | | | |
| | | | | | AL042614, | | | | | |
| | | | | | AL036858, | | | | | |
| | | | | | AL134538, | | | | | |
| | | | | | AL042984, | | | | | |
| | | | | | AL042544, | | | | | |
| | | | | | AL042542, | | | | | |
| | | | | | AL043019, U46346, | | | | | |
| | | | | | AL043003, | | | | | |
| | | | | | AL043037, | | | | | |
| | | | | | AL042551, | | | | | |
| | | | | | AL042896, | | | | | |
| | | | | | AL042850, | | | | | |
| | | | | | AL042995, U46345, | | | | | |
| | | | | | AL037094, | | | | | |
| | | | | | AL036268, | | | | | |
| | | | | | AL036190, | | | | | |
| | | | | | AL067639, | | | | | |
| | | | | | AL036196, | | | | | |
| | | | | | AL037526, | | | | | |
| | | | | | AL037085, | | | | | |
| | | | | | AL036998, | | | | | |
| | | | | | AL037082, | | | | | |
| | | | | | AL038447, | | | | | |
| | | | | | AL037615, | | | | | |
| | | | | | AL036733, | | | | | |
| | | | | | AR066494, | | | | | |
| | | | | | AR060234, A81671, | | | | | |
| | | | | | AR023813, | | | | | |
| | | | | | AB026436, | | | | | |
| | | | | | AR064707, | | | | | |
| | | | | | AR069079, and | | | | | |
| | | | | | AR054110. | | | | | |
| HCOQQ07 | 28 | 951658 | 1-424 | 15-438 | | | | | | |
| HOCMU03 | 29 | 922418 | 1-602 | 15-616 | | | | | | |
| HOCPJ03 | 30 | 917484 | 1-299 | 15-313 | AW374051, | | | | | |
| | | | | | AW374048, | | | | | |
| | | | | | AW374059, | | | | | |
| | | | | | AA047322, | | | | | |
| | | | | | AA573420, | | | | | |
| | | | | | AA873293, | | | | | |
| | | | | | H50745, T67156, | | | | | |
| | | | | | and AI718619. | | | | | |
| HOCQA47 | 31 | 954934 | 1-438 | 15-452 | AI583033, H89454, | | | | | |
| | | | | | R01665, AA837464, | | | | | |
| | | | | | AI364599, AA358063, | | | | | |
| | | | | | AC005730, | | | | | |
| | | | | | AC006121, | | | | | |
| | | | | | AC004884, | | | | | |
| | | | | | AL035461, | | | | | |
| | | | | | AC004821, | | | | | |
| | | | | | AL049869, | | | | | |
| | | | | | AP000010, | | | | | |
| | | | | | AJ003147, | | | | | |
| | | | | | AF165926, | | | | | |
| | | | | | AC002301, | | | | | |
| | | | | | AC005037, | | | | | |
| | | | | | AP000152, | | | | | |
| | | | | | and AL136504. | | | | | |
| HODEA90 | 32 | 782242 | 1-675 | 15-689 | | | | | | |
| HODEB04 | 33 | 927022 | 1-356 | 15-370 | AF011889. | | | | | |
| HODEC76 | 34 | 952204 | 1-599 | 15-613 | | | | | | |
| HODED11 | 35 | 966085 | 1-525 | 15-539 | | | | | | |
| HODED55 | 36 | 859368 | 1-595 | 15-609 | | | | | | |
| HODEF10 | 37 | 963494 | 1-595 | 15-609 | D80188, D59859, | | | | | |
| | | | | | C14389, D59927, | | | | | |
| | | | | | D58283, D81030, | | | | | |
| | | | | | D51799, D80253, | | | | | |
| | | | | | D80166, D80043, | | | | | |
| | | | | | D51423, D59619, | | | | | |
| | | | | | D80210, D80240, | | | | | |
| | | | | | D80212, D80391, | | | | | |
| | | | | | D59787, D50979, | | | | | |
| | | | | | D80227, D80022, | | | | | |
| | | | | | C14331, D80219, | | | | | |
| | | | | | D80195, D80196, | | | | | |
| | | | | | D59467, D80164, | | | | | |
| | | | | | D59275, D80366, | | | | | |
| | | | | | D59502, D57483, | | | | | |
| | | | | | D59610, D59889, | | | | | |
| | | | | | AA514188, D81026, | | | | | |
| | | | | | AA305409, D80248, | | | | | |
| | | | | | D80024, D80269, | | | | | |
| | | | | | AA305578, | | | | | |
| | | | | | C15076, D80522, | | | | | |
| | | | | | D80045, D80038, | | | | | |
| | | | | | C14014, D51022, | | | | | |
| | | | | | D50995, D80193, | | | | | |
| | | | | | D80251, D80378, | | | | | |
| | | | | | AA514186, D80241, | | | | | |
| | | | | | D51060, AW360811, | | | | | |
| | | | | | D80133, | | | | | |
| | | | | | AW177440, D80268, | | | | | |
| | | | | | C14429, AW178893, | | | | | |
| | | | | | AW375405, C75259, | | | | | |
| | | | | | T03269, | | | | | |
| | | | | | D80247, AW179328, | | | | | |
| | | | | | AW360844, | | | | | |
| | | | | | AW366296, | | | | | |
| | | | | | AW377671, | | | | | |
| | | | | | AW360817, | | | | | |
| | | | | | AW375406, D80439, | | | | | |
| | | | | | AW378534, | | | | | |
| | | | | | AW179332, | | | | | |
| | | | | | AW377672, | | | | | |
| | | | | | AW179023, | | | | | |
| | | | | | AW178905, C05695, | | | | | |
| | | | | | D80302, AW378532, | | | | | |
| | | | | | D80134, AW177501, | | | | | |
| | | | | | AW177511, | | | | | |
| | | | | | AW352171, D58253, | | | | | |
| | | | | | AW377676, | | | | | |
| | | | | | AW352170, D80132, | | | | | |
| | | | | | AW177731, | | | | | |
| | | | | | AW178907, | | | | | |
| | | | | | AW178906, D51759, | | | | | |
| | | | | | AW178762, | | | | | |
| | | | | | AW179019, | | | | | |
| | | | | | AW179024, | | | | | |
| | | | | | D59373, D51250, | | | | | |
| | | | | | AW177505, | | | | | |
| | | | | | AW360841, | | | | | |
| | | | | | AW179020, | | | | | |
| | | | | | AW178755, | | | | | |
| | | | | | AW178909, | | | | | |
| | | | | | AW177456, T11417, | | | | | |
| | | | | | AW369651, | | | | | |
| | | | | | AW179329, | | | | | |
| | | | | | AW178980, | | | | | |
| | | | | | D80157, AW177733, | | | | | |
| | | | | | AW378528, | | | | | |
| | | | | | AW178908, | | | | | |
| | | | | | AW178754, | | | | | |
| | | | | | AW179018, | | | | | |
| | | | | | AW352158, | | | | | |
| | | | | | D51079, AW352117, | | | | | |
| | | | | | AW176467, | | | | | |
| | | | | | AW352174, D51103, | | | | | |
| | | | | | AW367967, | | | | | |
| | | | | | AW179004, F13647, | | | | | |
| | | | | | AW179012, | | | | | |
| | | | | | AW178914, D80949, | | | | | |
| | | | | | AW378525, D52291, | | | | | |
| | | | | | D80064, AI910186, | | | | | |
| | | | | | C14227, D80168, | | | | | |
| | | | | | AW177728, | | | | | |
| | | | | | AW179009, D58246, | | | | | |
| | | | | | D81111, AW178774, | | | | | |
| | | | | | AW178911, | | | | | |
| | | | | | AW378543, | | | | | |
| | | | | | AW177722, | | | | | |
| | | | | | AW352163, C14298, | | | | | |
| | | | | | AW178983, T48593, | | | | | |
| | | | | | AI905856, C14407, | | | | | |
| | | | | | D59653, AW178781, | | | | | |
| | | | | | C06015, D59503, | | | | | |
| | | | | | D45260, AW352120, | | | | | |
| | | | | | D58101, | | | | | |
| | | | | | AW360834, | | | | | |
| | | | | | AW177723, | | | | | |
| | | | | | AW378540, Z21582, | | | | | |
| | | | | | D59474, D59627, | | | | | |
| | | | | | D80258, | | | | | |
| | | | | | H67854, AA809122, | | | | | |
| | | | | | AW367950, | | | | | |
| | | | | | AW378533, C03092, | | | | | |
| | | | | | H67866, AW177508, | | | | | |
| | | | | | AI535850, AA514184, | | | | | |
| | | | | | D45273, AI525923, | | | | | |
| | | | | | AA285331, D80228, | | | | | |
| | | | | | AI525917, | | | | | |
| | | | | | AW178986, | | | | | |
| | | | | | AW177497, D51213, | | | | | |
| | | | | | D51097, C14957, | | | | | |
| | | | | | AI525912, D80014, | | | | | |
| | | | | | D51221, T03116, | | | | | |
| | | | | | D59317, D60010, | | | | | |
| | | | | | C14973, AW177734, | | | | | |
| | | | | | AI525920, C14344, | | | | | |
| | | | | | AI557751, D50981, | | | | | |
| | | | | | AI525227, AI535686, | | | | | |
| | | | | | D59551, AI525235, | | | | | |
| | | | | | C14046, | | | | | |
| | | | | | D60214, AI557774, | | | | | |
| | | | | | T03048, AI525222, | | | | | |
| | | | | | C16955, AI525215, | | | | | |
| | | | | | AI525242, | | | | | |
| | | | | | AW378542, | | | | | |
| | | | | | AI525925, | | | | | |
| | | | | | AW378539, C05763, | | | | | |
| | | | | | Z33452, T02974, | | | | | |
| | | | | | D31458, | | | | | |
| | | | | | AI525237, | | | | | |
| | | | | | AW360855, D51053, | | | | | |
| | | | | | H67858, C04682, | | | | | |
| | | | | | AF053356, | | | | | |
| | | | | | AR008278, | | | | | |
| | | | | | A62298, AR018138, | | | | | |
| | | | | | AB028859, | | | | | |
| | | | | | AJ132110, A84916, | | | | | |
| | | | | | A62300, AF058696, | | | | | |
| | | | | | X67155, Y17188, | | | | | |
| | | | | | D26022, Y12724, | | | | | |
| | | | | | A25909, A67220, | | | | | |
| | | | | | D89785, A78862, | | | | | |
| | | | | | D34614, A82595, | | | | | |
| | | | | | A94995, D88547, | | | | | |
| | | | | | AV002449, | | | | | |
| | | | | | AR060385, | | | | | |
| | | | | | AR016808, | | | | | |
| | | | | | AR008443, X82626, | | | | | |
| | | | | | I50126, I50132, | | | | | |
| | | | | | I50128, I50133, | | | | | |
| | | | | | AR025207, | | | | | |
| | | | | | AR066488, | | | | | |
| | | | | | AR016514, | | | | | |
| | | | | | AR060138, | | | | | |
| | | | | | A45456, A26615, | | | | | |
| | | | | | AR052274, Y09669, | | | | | |
| | | | | | A43192, | | | | | |
| | | | | | A43190, AR038669, | | | | | |
| | | | | | AR066490, | | | | | |
| | | | | | AR066487, A30438, | | | | | |
| | | | | | I18367, AR054175, | | | | | |
| | | | | | I14842, D50010, | | | | | |
| | | | | | Y17187, AB012117, | | | | | |
| | | | | | AR008277, | | | | | |
| | | | | | AR008281, A63261, | | | | | |
| | | | | | AR008408, X68127, | | | | | |
| | | | | | AR062872, A70867, | | | | | |
| | | | | | AR016691, | | | | | |
| | | | | | AR016690, U46128, | | | | | |
| | | | | | A85396, D88507, | | | | | |
| | | | | | AR066482, A44171, | | | | | |
| | | | | | A85477, D13509, | | | | | |
| | | | | | I19525, A64136, | | | | | |
| | | | | | A68321, A86792, | | | | | |
| | | | | | AR060133, I79511, | | | | | |
| | | | | | X93549, U79457, | | | | | |
| | | | | | AF123263, | | | | | |
| | | | | | AR032065, | | | | | |
| | | | | | X72378, and | | | | | |
| | | | | | AR008382. | | | | | |
| HODEF87 | 38 | 974342 | 1-617 | 15-631 | C14389, D59859, | | | | | |
| | | | | | D80195, D80043, | | | | | |
| | | | | | D80188, D80166, | | | | | |
| | | | | | D51799, D51423, | | | | | |
| | | | | | D59619, D80210, | | | | | |
| | | | | | D80240, D80253, | | | | | |
| | | | | | D81030, D80164, | | | | | |
| | | | | | D58283, D80193, | | | | | |
| | | | | | AA305409, D80212, | | | | | |
| | | | | | D80022, C14331, | | | | | |
| | | | | | D80024, D80219, | | | | | |
| | | | | | D59467, D80391, | | | | | |
| | | | | | D59275, D59889, | | | | | |
| | | | | | D59787, D80227, | | | | | |
| | | | | | D59502, D57483, | | | | | |
| | | | | | D80366, D80196, | | | | | |
| | | | | | C15076, D51060, | | | | | |
| | | | | | D59927, D59610, | | | | | |
| | | | | | D80269, D80038, | | | | | |
| | | | | | D50979, D50995, | | | | | |
| | | | | | D80045, D80378, | | | | | |
| | | | | | C14014, D80241, | | | | | |
| | | | | | C14429, D51022, | | | | | |
| | | | | | AA305578, | | | | | |
| | | | | | AW177440, | | | | | |
| | | | | | D80248, AW179328, | | | | | |
| | | | | | T03269, C75259, | | | | | |
| | | | | | AW178893, | | | | | |
| | | | | | AA514186, D81026, | | | | | |
| | | | | | D80251, AW378532, | | | | | |
| | | | | | AA514188, D80134, | | | | | |
| | | | | | D80522, D80133, | | | | | |
| | | | | | AW360811, | | | | | |
| | | | | | AW178762, | | | | | |
| | | | | | AW178775, D58253, | | | | | |
| | | | | | D51250, F13647, | | | | | |
| | | | | | AW369651, | | | | | |
| | | | | | AW375405, | | | | | |
| | | | | | AW177501, | | | | | |
| | | | | | AW177511, D80268, | | | | | |
| | | | | | D81111, C05695, | | | | | |
| | | | | | D52291, D51079, | | | | | |
| | | | | | AW377671, | | | | | |
| | | | | | AW366296, D80949, | | | | | |
| | | | | | AW360844, | | | | | |
| | | | | | AW352158, | | | | | |
| | | | | | AW360817, | | | | | |
| | | | | | AW375406, | | | | | |
| | | | | | AW378534, | | | | | |
| | | | | | AW179332, | | | | | |
| | | | | | AW377672, | | | | | |
| | | | | | AW179023, | | | | | |
| | | | | | AW178905, | | | | | |
| | | | | | D80302, AI910186, | | | | | |
| | | | | | AW352117, | | | | | |
| | | | | | AW176467, D80439, | | | | | |
| | | | | | D80168, AW377676, | | | | | |
| | | | | | D80064, Z21582, | | | | | |
| | | | | | C14298, C14227, | | | | | |
| | | | | | AW3352171, D80132, | | | | | |
| | | | | | AW352170, | | | | | |
| | | | | | AW177731, | | | | | |
| | | | | | AW178907, | | | | | |
| | | | | | AW179019, | | | | | |
| | | | | | AW179024, D59373, | | | | | |
| | | | | | D80247, AI905856, | | | | | |
| | | | | | AW177505, | | | | | |
| | | | | | AW178906, | | | | | |
| | | | | | AW179020, | | | | | |
| | | | | | AW360841, | | | | | |
| | | | | | AW178909, | | | | | |
| | | | | | AW177456, | | | | | |
| | | | | | C06015, | | | | | |
| | | | | | AW179329, | | | | | |
| | | | | | C14407, | | | | | |
| | | | | | AW178980, | | | | | |
| | | | | | AW352174, | | | | | |
| | | | | | AW378528, | | | | | |
| | | | | | AW178908, | | | | | |
| | | | | | AW178754, | | | | | |
| | | | | | AW179018, T11417, | | | | | |
| | | | | | AW378540, | | | | | |
| | | | | | D51759, AW179004, | | | | | |
| | | | | | D80157, AW179012, | | | | | |
| | | | | | AW178914, | | | | | |
| | | | | | AW378525, D51103, | | | | | |
| | | | | | AW367967, | | | | | |
| | | | | | AW177728, | | | | | |
| | | | | | AW179009, D58246, | | | | | |
| | | | | | AW178774, | | | | | |
| | | | | | AW178911, | | | | | |
| | | | | | AW378543, | | | | | |
| | | | | | AW177722, | | | | | |
| | | | | | AW352163, | | | | | |
| | | | | | AW360834, | | | | | |
| | | | | | AA285331, | | | | | |
| | | | | | AW178983, | | | | | |
| | | | | | D51097, AW178781, | | | | | |
| | | | | | AI557751, T48593, | | | | | |
| | | | | | D59503, AI525923, | | | | | |
| | | | | | AW352120, A62298, | | | | | |
| | | | | | AJ132110, AR018138, | | | | | |
| | | | | | AR018138, A84916, | | | | | |
| | | | | | A62300, AR008278, | | | | | |
| | | | | | AB028859, | | | | | |
| | | | | | AF058696, X67155, | | | | | |
| | | | | | Y17188, D26022, | | | | | |
| | | | | | A25909, D89785, | | | | | |
| | | | | | A67220, A78862, | | | | | |
| | | | | | and D34614. | | | | | |
| HODEG86 | 39 | 784833 | 1-634 | 15-648 | | | | | | |
| HODEH08 | 40 | 963895 | 1-129 | 15-143 | AA370640, | | | | | |
| | | | | | AW248314, | | | | | |
| | | | | | AA371439, | | | | | |
| | | | | | AA344067, | | | | | |
| | | | | | AA370162, D31255, | | | | | |
| | | | | | AA340719, | | | | | |
| | | | | | AA331358, | | | | | |
| | | | | | AW248978, | | | | | |
| | | | | | AA488592, | | | | | |
| | | | | | AW406647, W44489, | | | | | |
| | | | | | AI083656, AA358813, | | | | | |
| | | | | | AA360045, T97410, | | | | | |
| | | | | | R07253, AI582770, | | | | | |
| | | | | | H29999, Z59378, | | | | | |
| | | | | | Z64078, Z64079, | | | | | |
| | | | | | and Z54696. | | | | | |
| HODEH22 | 41 | 974329 | 1-411 | 15-425 | | | | | | |
| HODEI13 | 42 | 859318 | 1-599 | 15-613 | | | | | | |
| HODET48 | 43 | 841906 | 1-660 | 15-674 | | | | | | |
| HODEK50 | 44 | 859307 | 1-728 | 15-742 | AC007075, | | | | | |
| | | | | | AC007226, | | | | | |
| | | | | | AL080243, | | | | | |
| | | | | | AC004967, | | | | | |
| | | | | | AC002352, U91321, | | | | | |
| | | | | | AC006275, | | | | | |
| | | | | | AC002551, | | | | | |
| | | | | | AC005519, | | | | | |
| | | | | | AC004832, | | | | | |
| | | | | | AF196779, | | | | | |
| | | | | | AD001527, | | | | | |
| | | | | | AC002404, | | | | | |
| | | | | | AC005089, | | | | | |
| | | | | | AC005952, | | | | | |
| | | | | | AC005280, | | | | | |
| | | | | | AC003684, | | | | | |
| | | | | | AL031431, | | | | | |
| | | | | | and AC005972. | | | | | |
| HODEL92 | 45 | 859313 | 1-252 | 15-266 | | | | | | |
| HODEN75 | 46 | 772940 | 1-579 | 15-593 | AW339014, | | | | | |
| | | | | | and AC005630. | | | | | |
| HODEO87 | 47 | 930735 | 1-164 | 15-178 | | | | | | |
| HODEP04 | 48 | 926984 | 1-585 | 15-599 | AA317093. | | | | | |
| HODEP12 | 49 | 965534 | 1-427 | 15-441 | | | | | | |
| HODEP86 | 50 | 784846 | 1-404 | 15-418 | | | | | | |
| HODEQ28 | 51 | 972808 | 1-438 | 15-452 | | | | | | |
| HODEQ79 | 52 | 859287 | 1-516 | 15-530 | AB033061. | | | | | |
| HODES86 | 53 | 784815 | 1-920 | 15-934 | AA063018, | | | | | |
| | | | | | AA063458, AI444822, | | | | | |
| | | | | | AA666066, T94072, | | | | | |
| | | | | | C15362, AA890123, | | | | | |
| | | | | | AW190277, N54301, | | | | | |
| | | | | | AI866580, AA363003, | | | | | |
| | | | | | AI277783, AI277783, | | | | | |
| | | | | | AI018726, AI018726, | | | | | |
| | | | | | AA368726, | | | | | |
| | | | | | AA366676, AA329535, | | | | | |
| | | | | | AA078184, | | | | | |
| | | | | | AL119028, AI926296, | | | | | |
| | | | | | H60331, AW243945, | | | | | |
| | | | | | AW083934, | | | | | |
| | | | | | AA504951, | | | | | |
| | | | | | AA702637, AI054414, | | | | | |
| | | | | | AW162303, | | | | | |
| | | | | | AA584207, | | | | | |
| | | | | | AW089016, | | | | | |
| | | | | | AW162047, | | | | | |
| | | | | | AI818702, | | | | | |
| | | | | | AW270429, | | | | | |
| | | | | | AA341865, M86102, | | | | | |
| | | | | | C15811, AW161786, | | | | | |
| | | | | | AA577824, | | | | | |
| | | | | | AW270351, | | | | | |
| | | | | | AA501781, | | | | | |
| | | | | | AL037632, | | | | | |
| | | | | | AI904944, AI224619, | | | | | |
| | | | | | AL118912, AI369076, | | | | | |
| | | | | | AI268019, R56349, | | | | | |
| | | | | | AI654520, AI565084, | | | | | |
| | | | | | AI246061, AA356376, | | | | | |
| | | | | | AI432298, AA552724, | | | | | |
| | | | | | R98835, AI130709, | | | | | |
| | | | | | AI536858, AI537995, | | | | | |
| | | | | | AA508882, AI278847, | | | | | |
| | | | | | AA626840, | | | | | |
| | | | | | AA773473, | | | | | |
| | | | | | AW051819, | | | | | |
| | | | | | AA339789, | | | | | |
| | | | | | AA302982, | | | | | |
| | | | | | AW069227, | | | | | |
| | | | | | AW272640, | | | | | |
| | | | | | AW148775, | | | | | |
| | | | | | AI668566, AI814682, | | | | | |
| | | | | | AA326904, AI291439, | | | | | |
| | | | | | AI720403, T62078, | | | | | |
| | | | | | AI873627, AA504892, | | | | | |
| | | | | | AW337526, | | | | | |
| | | | | | AA910941, | | | | | |
| | | | | | AA365318, R44855, | | | | | |
| | | | | | AW381816, | | | | | |
| | | | | | AA126271, AI634187, | | | | | |
| | | | | | AA904211, | | | | | |
| | | | | | AA626595, | | | | | |
| | | | | | AA745628, AI354330, | | | | | |
| | | | | | AI381490, AI457313, | | | | | |
| | | | | | AA827383, | | | | | |
| | | | | | AW132065, | | | | | |
| | | | | | AA513189, | | | | | |
| | | | | | AA827875, | | | | | |
| | | | | | AI357109, AA632556, | | | | | |
| | | | | | AA604149, | | | | | |
| | | | | | AL134418, | | | | | |
| | | | | | AA078137, AI247101 | | | | | |
| | | | | | H13120, AI125615, | | | | | |
| | | | | | AA314338, | | | | | |
| | | | | | AA362440, | | | | | |
| | | | | | AW236288, | | | | | |
| | | | | | AA888638, T02817, | | | | | |
| | | | | | AI251968, AI251976, | | | | | |
| | | | | | AI308598, H27788, | | | | | |
| | | | | | AI254673, AI246059, | | | | | |
| | | | | | AI255003, AI241970, | | | | | |
| | | | | | AI223508, AI254658, | | | | | |
| | | | | | AI252933, AI251598, | | | | | |
| | | | | | AI251380, AI254937, | | | | | |
| | | | | | AA628740, H65697, | | | | | |
| | | | | | H65213, AW337483, | | | | | |
| | | | | | AI049630, H03243, | | | | | |
| | | | | | T06485, AI521042, | | | | | |
| | | | | | AA297776, AI679045, | | | | | |
| | | | | | AA525517, H73550, | | | | | |
| | | | | | AA351893, | | | | | |
| | | | | | AA297496, | | | | | |
| | | | | | AA721523, | | | | | |
| | | | | | AA721530, | | | | | |
| | | | | | AA380781, | | | | | |
| | | | | | AA101264, | | | | | |
| | | | | | AA564714, | | | | | |
| | | | | | AA362569, | | | | | |
| | | | | | AI254798, | | | | | |
| | | | | | AI199816, AA378195, | | | | | |
| | | | | | AA937687, | | | | | |
| | | | | | AA584525, | | | | | |
| | | | | | AA572813, T06876, | | | | | |
| | | | | | AI831172, | | | | | |
| | | | | | AW103395, | | | | | |
| | | | | | AI284684, AI252207, | | | | | |
| | | | | | AA862312, AI270149, | | | | | |
| | | | | | N54179, U02047, | | | | | |
| | | | | | AC004531, | | | | | |
| | | | | | AC004382, | | | | | |
| | | | | | AP000116, X58139, | | | | | |
| | | | | | AC007114, | | | | | |
| | | | | | AP000310, AP000547, | | | | | |
| | | | | | AC004646, | | | | | |
| | | | | | AC005242, Z94161, | | | | | |
| | | | | | AC004644, U89336, | | | | | |
| | | | | | AL049650, | | | | | |
| | | | | | AC006057, | | | | | |
| | | | | | AF139813, | | | | | |
| | | | | | AC007023, | | | | | |
| | | | | | AC005899, U77079, | | | | | |
| | | | | | U77081, AC000061, | | | | | |
| | | | | | AC003110, | | | | | |
| | | | | | AC006450, | | | | | |
| | | | | | AF015416, | | | | | |
| | | | | | AL133289, | | | | | |
| | | | | | AC004552, | | | | | |
| | | | | | AC008103, Z98051, | | | | | |
| | | | | | AC004834, | | | | | |
| | | | | | AL132712, | | | | | |
| | | | | | APOOO513, Z98745, | | | | | |
| | | | | | AC005320, | | | | | |
| | | | | | AC006482, | | | | | |
| | | | | | AL049591, | | | | | |
| | | | | | X96421, AC007325, | | | | | |
| | | | | | AC004228, Z73963, | | | | | |
| | | | | | U73963, U77078, | | | | | |
| | | | | | AL049829, | | | | | |
| | | | | | AC004494, Z84487, | | | | | |
| | | | | | AF196969, L22968, | | | | | |
| | | | | | AC005678, | | | | | |
| | | | | | AC005544, | | | | | |
| | | | | | AC004999, | | | | | |
| | | | | | AL022323, | | | | | |
| | | | | | AC004585, | | | | | |
| | | | | | AC006441, | | | | | |
| | | | | | AC005224. | | | | | |
| | | | | | AC006277, | | | | | |
| | | | | | AL022728, Z68872, | | | | | |
| | | | | | AC005399, | | | | | |
| | | | | | AC005175, | | | | | |
| | | | | | AC004551, | | | | | |
| | | | | | AC011422, | | | | | |
| | | | | | AF111168, | | | | | |
| | | | | | AP000260, | | | | | |
| | | | | | AC006084, Z68756, | | | | | |
| | | | | | AC005237, | | | | | |
| | | | | | AC000003, | | | | | |
| | | | | | AC006430, Z84497, | | | | | |
| | | | | | AC002375, | | | | | |
| | | | | | AC002352, | | | | | |
| | | | | | AL133448, | | | | | |
| | | | | | AC006049, | | | | | |
| | | | | | AC004832, | | | | | |
| | | | | | AC005632, | | | | | |
| | | | | | U69641, AC003689, | | | | | |
| | | | | | AF053356, Z98044, | | | | | |
| | | | | | AL035405, | | | | | |
| | | | | | AL096767, | | | | | |
| | | | | | AL023513, | | | | | |
| | | | | | AC004841, | | | | | |
| | | | | | AC002312, | | | | | |
| | | | | | AF196779, | | | | | |
| | | | | | AP001053, | | | | | |
| | | | | | AC004998, | | | | | |
| | | | | | AL024507, Z84719, | | | | | |
| | | | | | AL034423, | | | | | |
| | | | | | AC007204, | | | | | |
| | | | | | AC003109, | | | | | |
| | | | | | AL023807, Z99291, | | | | | |
| | | | | | D89927, AL031984, | | | | | |
| | | | | | AL031776, | | | | | |
| | | | | | AC008044, | | | | | |
| | | | | | AC005232, | | | | | |
| | | | | | AC002504, | | | | | |
| | | | | | AC002425, | | | | | |
| | | | | | AF030453, | | | | | |
| | | | | | AF196971, | | | | | |
| | | | | | AC004217, | | | | | |
| | | | | | AC003682, U85195, | | | | | |
| | | | | | AC002325, | | | | | |
| | | | | | AL132774, | | | | | |
| | | | | | AB023049, | | | | | |
| | | | | | AP001056, U73644, | | | | | |
| | | | | | AC004263, | | | | | |
| | | | | | AC002384, | | | | | |
| | | | | | AC005872, | | | | | |
| | | | | | AL022313, | | | | | |
| | | | | | AC008055, | | | | | |
| | | | | | AC004820, | | | | | |
| | | | | | AE000658, | | | | | |
| | | | | | AC003080, | | | | | |
| | | | | | AC001502, | | | | | |
| | | | | | AC006312, | | | | | |
| | | | | | AC009784, | | | | | |
| | | | | | AC004782, | | | | | |
| | | | | | AL031667, | | | | | |
| | | | | | AC003107, | | | | | |
| | | | | | AC000052, | | | | | |
| | | | | | AC007015, | | | | | |
| | | | | | AC006251, | | | | | |
| | | | | | AC005338, | | | | | |
| | | | | | AC004988, | | | | | |
| | | | | | AC007314, Z82190, | | | | | |
| | | | | | AC000379, | | | | | |
| | | | | | AC006285, | | | | | |
| | | | | | AC005666, | | | | | |
| | | | | | AC006947, | | | | | |
| | | | | | AL078581, | | | | | |
| | | | | | AC004253, U91323, | | | | | |
| | | | | | AP001137, AP000099, | | | | | |
| | | | | | AC002314, | | | | | |
| | | | | | AL008712, | | | | | |
| | | | | | AL035703, | | | | | |
| | | | | | AC007057, | | | | | |
| | | | | | AC000118, | | | | | |
| | | | | | AL133396, | | | | | |
| | | | | | AC006543, | | | | | |
| | | | | | AC005514, | | | | | |
| | | | | | AC004876, Z83845, | | | | | |
| | | | | | AC007666, | | | | | |
| | | | | | AF038458, | | | | | |
| | | | | | AC005180, | | | | | |
| | | | | | AL135960, AJ131016, | | | | | |
| | | | | | X82877, AL031736, | | | | | |
| | | | | | AC004815, | | | | | |
| | | | | | AC004882, | | | | | |
| | | | | | AL035450, | | | | | |
| | | | | | AL008718, | | | | | |
| | | | | | AL049776, Z98200, | | | | | |
| | | | | | AL022144, U91327, | | | | | |
| | | | | | L47234, AC006948, | | | | | |
| | | | | | AC005351, Z93244, | | | | | |
| | | | | | AC006075, | | | | | |
| | | | | | AL034555, | | | | | |
| | | | | | AL049636, | | | | | |
| | | | | | AC006544, Z97030, | | | | | |
| | | | | | AL009183, | | | | | |
| | | | | | AC005372, Z95115, | | | | | |
| | | | | | M25828, Z70289, | | | | | |
| | | | | | AP000690, | | | | | |
| | | | | | AC005565, | | | | | |
| | | | | | AL020997, | | | | | |
| | | | | | AC007687, | | | | | |
| | | | | | AC006051, | | | | | |
| | | | | | AL031427, | | | | | |
| | | | | | AC003020, X94652, | | | | | |
| | | | | | AC002996, | | | | | |
| | | | | | AL021307, | | | | | |
| | | | | | AC004492, | | | | | |
| | | | | | AC005620, | | | | | |
| | | | | | AC002347, S48539, | | | | | |
| | | | | | AC003663, | | | | | |
| | | | | | AC009363, | | | | | |
| | | | | | AP000952, | | | | | |
| | | | | | AC006474, | | | | | |
| | | | | | AC006241, | | | | | |
| | | | | | AC004905, | | | | | |
| | | | | | AC005049, | | | | | |
| | | | | | AL031602, Z93024, | | | | | |
| | | | | | AC005274, D86995, | | | | | |
| | | | | | AC007182, Z54246, | | | | | |
| | | | | | AF001550, | | | | | |
| | | | | | AC004865, | | | | | |
| | | | | | AC002365, | | | | | |
| | | | | | AC002365, | | | | | |
| | | | | | AC005820, | | | | | |
| | | | | | AL031315, | | | | | |
| | | | | | AC005562, | | | | | |
| | | | | | AP000023, | | | | | |
| | | | | | AC005070, Z81357, | | | | | |
| | | | | | AC006538, | | | | | |
| | | | | | AC005014, | | | | | |
| | | | | | AC004796, | | | | | |
| | | | | | AC002369, | | | | | |
| | | | | | AC005771, | | | | | |
| | | | | | AC002302, | | | | | |
| | | | | | AC007124, | | | | | |
| | | | | | AF073485, | | | | | |
| | | | | | AP000055, AP000170, | | | | | |
| | | | | | AF015720, AF146367, | | | | | |
| | | | | | AC004890, | | | | | |
| | | | | | AL031005, | | | | | |
| | | | | | AL133163, | | | | | |
| | | | | | AP000036, | | | | | |
| | | | | | AC006561, | | | | | |
| | | | | | AL109847, Z82215, | | | | | |
| | | | | | U07562, | | | | | |
| | | | | | AC006065, | | | | | |
| | | | | | AL109939, | | | | | |
| | | | | | and AC007065. | | | | | |
| HODET03 | 54 | 922988 | 1-485 | 15-499 | | | | | | |
| HODEV13 | 55 | 859302 | 1-756 | 15-770 | | | | | | |
| HODEX10 | 56 | 926260 | 1-373 | 15-387 | | | | | | |
| HODEX31 | 57 | 922473 | 1-512 | 15-526 | | | | | | |
| HODEY08 | 58 | 972984 | 1-1100 | 15- | AI084273, AA573804, | | | | | |
| | | | | 1114 | AI131332, AI597908, | | | | | |
| | | | | | AW166900, | | | | | |
| | | | | | AA335039, | | | | | |
| | | | | | AA826556, | | | | | |
| | | | | | AA451989, | | | | | |
| | | | | | AA286811, | | | | | |
| | | | | | AA953404, | | | | | |
| | | | | | AW075574, | | | | | |
| | | | | | AA605285, | | | | | |
| | | | | | AA919038, | | | | | |
| | | | | | AA701491, | | | | | |
| | | | | | AW086028, | | | | | |
| | | | | | AI565546, AA885214, | | | | | |
| | | | | | AI248960, AA884815, | | | | | |
| | | | | | and AA974731. | | | | | |
| HODEY13 | 59 | 859323 | 1-686 | 15-700 | | | | | | |
| HODEY80 | 60 | 859296 | 1-873 | 15-887 | AL049821. | | | | | |
| HODEZ11 | 61 | 952166 | 1-431 | 15-445 | AF195658, | | | | | |
| | | | | | AL049780, | | | | | |
| | | | | | and AC006530. | | | | | |
| HODFA38 | 62 | 934266 | 1-627 | 15-641 | AA570447. | | | | | |
| HODFB05 | 63 | 929733 | 1-627 | 15-641 | | | | | | |
| HODFB57 | 64 | 972810 | 1-641 | 15-655 | | | | | | |
| HODFB88 | 65 | 792979 | 1-620 | 15-634 | AA381448, | | | | | |
| | | | | | AA381591, | | | | | |
| | | | | | AA307619, | | | | | |
| | | | | | and U46407. | | | | | |
| HODFD08 | 66 | 958371 | 1-383 | 15-397 | | | | | | |
| HODFD10 | 67 | 963516 | 1-560 | 15-574 | | | | | | |
| HODFD45 | 68 | 780531 | 1-387 | 15-401 | AC009263. | | | | | |
| HODFE69 | 69 | 859338 | 1-288 | 15-302 | | | | | | |
| HODFG37 | 70 | 782219 | 1-523 | 15-537 | AL009031, | | | | | |
| | | | | | and AC002326. | | | | | |
| HODFH02 | 71 | 915257 | 1-280 | 15-294 | | | | | | |
| HODFH76 | 72 | 783783 | 1-521 | 15-535 | | | | | | |
| HODFK18 | 73 | 974313 | 1-728 | 15-742 | AW194418, | | | | | |
| | | | | | and AI859957. | | | | | |
| HODFK94 | 74 | 974318 | 1-635 | 15-649 | | | | | | |
| HODFL91 | 75 | 918456 | 1-517 | 15-531 | AL009031, | | | | | |
| | | | | | and AC002326. | | | | | |
| HODFN19 | 76 | 859334 | 1-507 | 15-521 | AI498226, AI468496, | | | | | |
| | | | | | AI675849, AA411880, | | | | | |
| | | | | | U95626, AL022334, | | | | | |
| | | | | | AC005234, | | | | | |
| | | | | | AC002524, | | | | | |
| | | | | | AC006031, L47334, | | | | | |
| | | | | | AL049594, | | | | | |
| | | | | | and AC005011. | | | | | |
| HODFO37 | 77 | 859314 | 1-530 | 15-544 | AI669554, AA854975, | | | | | |
| | | | | | AI016754, AA024782, | | | | | |
| | | | | | and AA009958. | | | | | |
| HODFQ02 | 78 | 918637 | 1-601 | 15-615 | | | | | | |
| HODFQ06 | 79 | 934304 | 1-524 | 15-538 | AI523074, AI709307, | | | | | |
| | | | | | AI284105, AA904211, | | | | | |
| | | | | | AI271762, AI735609, | | | | | |
| | | | | | AW270258, | | | | | |
| | | | | | AI031759, | | | | | |
| | | | | | AW082076, | | | | | |
| | | | | | AA515351, | | | | | |
| | | | | | AW083934, | | | | | |
| | | | | | AA744227, | | | | | |
| | | | | | AA713765, | | | | | |
| | | | | | AI955029, Z33592, | | | | | |
| | | | | | AA478602, | | | | | |
| | | | | | AW028376, | | | | | |
| | | | | | AA744094, | | | | | |
| | | | | | AA548692, AI492579, | | | | | |
| | | | | | AI267356, AA297496, | | | | | |
| | | | | | AA493628, | | | | | |
| | | | | | AA912287, AI431513, | | | | | |
| | | | | | AA492524, AI247101, | | | | | |
| | | | | | AI061313, AI267450, | | | | | |
| | | | | | AI613389, AI311796, | | | | | |
| | | | | | AA657374, AI281818, | | | | | |
| | | | | | AW274078, | | | | | |
| | | | | | AW303196, | | | | | |
| | | | | | AW274349, | | | | | |
| | | | | | AI348597, AI889579, | | | | | |
| | | | | | AW272640, | | | | | |
| | | | | | AW089016, | | | | | |
| | | | | | AA604831, H52283, | | | | | |
| | | | | | AA837642, | | | | | |
| | | | | | AA827383, | | | | | |
| | | | | | AA744048, T49184, | | | | | |
| | | | | | AI253376, AC005815, | | | | | |
| | | | | | AC0O8132, | | | | | |
| | | | | | AC007981, | | | | | |
| | | | | | AC012330, | | | | | |
| | | | | | AP000550, | | | | | |
| | | | | | AC008018, | | | | | |
| | | | | | ACO07324, | | | | | |
| | | | | | AC007325, | | | | | |
| | | | | | AC007325, | | | | | |
| | | | | | AC009288, | | | | | |
| | | | | | AP000552, | | | | | |
| | | | | | AC007664, | | | | | |
| | | | | | AC007708, | | | | | |
| | | | | | AC009399, | | | | | |
| | | | | | AC007917, | | | | | |
| | | | | | AL034419, | | | | | |
| | | | | | AC005209, | | | | | |
| | | | | | AP000511, | | | | | |
| | | | | | AL050341, | | | | | |
| | | | | | AL035681, | | | | | |
| | | | | | AL022329, | | | | | |
| | | | | | AC004832, | | | | | |
| | | | | | AF205588, | | | | | |
| | | | | | AC004019, | | | | | |
| | | | | | AC005250, I34294, | | | | | |
| | | | | | AF030453, Z97054, | | | | | |
| | | | | | AC005837, | | | | | |
| | | | | | AL139054, | | | | | |
| | | | | | AC005529, | | | | | |
| | | | | | AC004525, | | | | | |
| | | | | | AC005519, | | | | | |
| | | | | | AC007450, | | | | | |
| | | | | | AL049712, | | | | | |
| | | | | | AC007225, | | | | | |
| | | | | | AL031594, | | | | | |
| | | | | | AC004675, | | | | | |
| | | | | | AL121825, | | | | | |
| | | | | | AC010205, | | | | | |
| | | | | | AL031311, Z81366, | | | | | |
| | | | | | AF088219, | | | | | |
| | | | | | AL117354, | | | | | |
| | | | | | AC005740, | | | | | |
| | | | | | AC005102, | | | | | |
| | | | | | AC005089, | | | | | |
| | | | | | AL133448, | | | | | |
| | | | | | AC002312, | | | | | |
| | | | | | AC005037, | | | | | |
| | | | | | AL049631, | | | | | |
| | | | | | AL024498, | | | | | |
| | | | | | AC003043, Z85987, | | | | | |
| | | | | | AC006443, | | | | | |
| | | | | | AC005914, | | | | | |
| | | | | | AC005399, | | | | | |
| | | | | | AC005081, | | | | | |
| | | | | | AC004893, | | | | | |
| | | | | | AC006538, | | | | | |
| | | | | | AC005800, | | | | | |
| | | | | | AL049569, | | | | | |
| | | | | | AL117352, | | | | | |
| | | | | | AL135744, | | | | | |
| | | | | | AC005881, | | | | | |
| | | | | | AC006241, | | | | | |
| | | | | | AC016027, | | | | | |
| | | | | | AC006126, | | | | | |
| | | | | | AC004757, | | | | | |
| | | | | | AL022313, | | | | | |
| | | | | | AP000257, | | | | | |
| | | | | | AG006501, | | | | | |
| | | | | | AC006014, | | | | | |
| | | | | | AC005527, | | | | | |
| | | | | | AL049759, | | | | | |
| | | | | | AC006430, | | | | | |
| | | | | | AC006285, | | | | | |
| | | | | | AC004878, | | | | | |
| | | | | | AC008101, | | | | | |
| | | | | | AP000501, | | | | | |
| | | | | | AL121757, | | | | | |
| | | | | | AL034417, | | | | | |
| | | | | | AL008726, | | | | | |
| | | | | | AL035685, M90058, | | | | | |
| | | | | | AP000512, AP000704, | | | | | |
| | | | | | AC005901, | | | | | |
| | | | | | AC004884, | | | | | |
| | | | | | AL031670, | | | | | |
| | | | | | AC004491, | | | | | |
| | | | | | AC006511, U80017, | | | | | |
| | | | | | AL034418, Z97630, | | | | | |
| | | | | | AL078463, | | | | | |
| | | | | | AC005231, | | | | | |
| | | | | | AL035462, | | | | | |
| | | | | | AF207550, | | | | | |
| | | | | | AC005488, Z98051, | | | | | |
| | | | | | AL133382, | | | | | |
| | | | | | AF053356, | | | | | |
| | | | | | AL022316, | | | | | |
| | | | | | AF092858, | | | | | |
| | | | | | AC005940, | | | | | |
| | | | | | AP000355, | | | | | |
| | | | | | AC008038, | | | | | |
| | | | | | AC005015, | | | | | |
| | | | | | AB003151, | | | | | |
| | | | | | AC006536, | | | | | |
| | | | | | AC005920, | | | | | |
| | | | | | AC004167, | | | | | |
| | | | | | AC003101, Z97056, | | | | | |
| | | | | | AC007057, | | | | | |
| | | | | | AC005962, | | | | | |
| | | | | | AC002316, M84371, | | | | | |
| | | | | | AP000347, | | | | | |
| | | | | | AL031681, | | | | | |
| | | | | | AL022238, Z94801, | | | | | |
| | | | | | AP001054, | | | | | |
| | | | | | AC005736, | | | | | |
| | | | | | AL031282, | | | | | |
| | | | | | AP000098, | | | | | |
| | | | | | AL133353, | | | | | |
| | | | | | Z75741, AC002128, | | | | | |
| | | | | | AL008582, | | | | | |
| | | | | | AC005695, | | | | | |
| | | | | | AC016830, Z85986, | | | | | |
| | | | | | U96629, AC002039, | | | | | |
| | | | | | AL132857, AC005220, | | | | | |
| | | | | | AP000694, | | | | | |
| | | | | | AL121658, | | | | | |
| | | | | | AC004752, | | | | | |
| | | | | | AF017104, AF045555, | | | | | |
| | | | | | AL031602, | | | | | |
| | | | | | AC007546, | | | | | |
| | | | | | AC005088, | | | | | |
| | | | | | AC002301, | | | | | |
| | | | | | AP000557, | | | | | |
| | | | | | AC004992, | | | | | |
| | | | | | AC004659, Z82190, | | | | | |
| | | | | | AL031662, | | | | | |
| | | | | | AC016025, | | | | | |
| | | | | | AC002401, | | | | | |
| | | | | | AC004655, | | | | | |
| | | | | | AC016831, Z69705, | | | | | |
| | | | | | AC007406, | | | | | |
| | | | | | AC006121, | | | | | |
| | | | | | AC005755, | | | | | |
| | | | | | AC002369, | | | | | |
| | | | | | AC006211, Z98946, | | | | | |
| | | | | | AC005730, | | | | | |
| | | | | | AC002352, | | | | | |
| | | | | | AC004662, | | | | | |
| | | | | | AB023049, Z84466, | | | | | |
| | | | | | AD000091, | | | | | |
| | | | | | AC005031, | | | | | |
| | | | | | AD000092, | | | | | |
| | | | | | AC002470, | | | | | |
| | | | | | AP000692, | | | | | |
| | | | | | AL020995, | | | | | |
| | | | | | AC009247, | | | | | |
| | | | | | AC004754, | | | | | |
| | | | | | AC004859, | | | | | |
| | | | | | AL031776, | | | | | |
| | | | | | AC002115, | | | | | |
| | | | | | AC018769, | | | | | |
| | | | | | AP000348, Z83846, | | | | | |
| | | | | | AC004139, | | | | | |
| | | | | | AL020997, | | | | | |
| | | | | | AL034369, | | | | | |
| | | | | | AG003982, U34879, | | | | | |
| | | | | | AC005300, | | | | | |
| | | | | | AC003991, | | | | | |
| | | | | | AC006064, | | | | | |
| | | | | | AF111167, | | | | | |
| | | | | | AC009510, | | | | | |
| | | | | | AL133246, | | | | | |
| | | | | | AL049758, | | | | | |
| | | | | | AC004531, | | | | | |
| | | | | | AC005360, | | | | | |
| | | | | | AB023051, | | | | | |
| | | | | | AP000252, | | | | | |
| | | | | | AL033527, | | | | | |
| | | | | | AP000504, | | | | | |
| | | | | | AC005697, | | | | | |
| | | | | | AL096701, | | | | | |
| | | | | | AG005793, | | | | | |
| | | | | | AC002351, | | | | | |
| | | | | | AC002073, | | | | | |
| | | | | | AC007227, | | | | | |
| | | | | | AC002551, | | | | | |
| | | | | | AB016897, | | | | | |
| | | | | | AC006125, | | | | | |
| | | | | | AC006449, | | | | | |
| | | | | | AL031667, | | | | | |
| | | | | | AC002350, | | | | | |
| | | | | | AC004587, | | | | | |
| | | | | | AF134726, | | | | | |
| | | | | | AC007298, | | | | | |
| | | | | | AL008583, U91326, | | | | | |
| | | | | | AC007993, | | | | | |
| | | | | | AL109839, | | | | | |
| | | | | | AC007536, | | | | | |
| | | | | | AC007637, | | | | | |
| | | | | | AL078581, | | | | | |
| | | | | | AC006101, Z94056, | | | | | |
| | | | | | AC005162, | | | | | |
| | | | | | AL022315, | | | | | |
| | | | | | AL121653, | | | | | |
| | | | | | AC005005, | | | | | |
| | | | | | AC005316, | | | | | |
| | | | | | AC005874, | | | | | |
| | | | | | AF134471, | | | | | |
| | | | | | AC004953, | | | | | |
| | | | | | AC006071, | | | | | |
| | | | | | AC005726, | | | | | |
| | | | | | AL022237, | | | | | |
| | | | | | AL079342, | | | | | |
| | | | | | AP000212, | | | | | |
| | | | | | AP000134, | | | | | |
| | | | | | AC004685, | | | | | |
| | | | | | and AC005768. | | | | | |
| HODFT52 | 80 | 915232 | 1-789 | 15-803 | | | | | | |
| HODFU02 | 81 | 918536 | 1-386 | 15-400 | | | | | | |
| HODFU06 | 82 | 934229 | 1-625 | 15-639 | Z68868. | | | | | |
| HODFU47 | 83 | 806232 | 1-641 | 15-655 | AW265148. | | | | | |
| HODFU54 | 84 | 965526 | 1-123 | 15-137 | | | | | | |
| HODFW17 | 85 | 859322 | 1-599 | 15-613 | AW008635, | | | | | |
| | | | | | AC018633, | | | | | |
| | | | | | and AC005271. | | | | | |
| HODFX57 | 86 | 975259 | 1-407 | 15-421 | | | | | | |
| HODFY16 | 87 | 958329 | 1-776 | 15-790 | AA262613. | | | | | |
| HODFY79 | 88 | 975253 | 1-525 | 15-539 | | | | | | |
| HODGC04 | 89 | 926863 | 1-201 | 15-215 | AC019014. | | | | | |
| HODGC61 | 90 | 973449 | 1-512 | 15-526 | | | | | | |
| HODGD05 | 91 | 931071 | 1-135 | 15-149 | | | | | | |
| HODGH02 | 92 | 917969 | 1-626 | 15-640 | D80164, C14389, | | | | | |
| | | | | | D80227, D59467, | | | | | |
| | | | | | C15076, D50979, | | | | | |
| | | | | | D80269, D80195, | | | | | |
| | | | | | D59275, D59502, | | | | | |
| | | | | | D58283, D51799, | | | | | |
| | | | | | D59859, D80022, | | | | | |
| | | | | | C14331, D80166, | | | | | |
| | | | | | D80043, D51423, | | | | | |
| | | | | | D59619, D81030, | | | | | |
| | | | | | D80210, D80391, | | | | | |
| | | | | | D80240, D80253, | | | | | |
| | | | | | D59787, D59610, | | | | | |
| | | | | | D80188, D80038, | | | | | |
| | | | | | D80378, D80212, | | | | | |
| | | | | | D80193, D80196, | | | | | |
| | | | | | D80219, D59927, | | | | | |
| | | | | | D57483, AA305409, | | | | | |
| | | | | | D80366, D59889, | | | | | |
| | | | | | D59889, D50995, | | | | | |
| | | | | | D80024, D80241, | | | | | |
| | | | | | AW177440, | | | | | |
| | | | | | AA305578, D80045, | | | | | |
| | | | | | C14429, D51022, | | | | | |
| | | | | | D51060, T03269, | | | | | |
| | | | | | D81026, AW178893, | | | | | |
| | | | | | AW378532, | | | | | |
| | | | | | AA514188, C75259, | | | | | |
| | | | | | C14014, D80251, | | | | | |
| | | | | | D80248, AW179328, | | | | | |
| | | | | | D80522, D59695, | | | | | |
| | | | | | D80134, D52291, | | | | | |
| | | | | | D51250, AW369651, | | | | | |
| | | | | | AW178775, D58253, | | | | | |
| | | | | | AW177501, | | | | | |
| | | | | | AW177511, | | | | | |
| | | | | | AW178762, | | | | | |
| | | | | | AW176467, F13647, | | | | | |
| | | | | | AA514186, D80133, | | | | | |
| | | | | | AW360811, | | | | | |
| | | | | | AW352117, | | | | | |
| | | | | | AW352158, C05695 | | | | | |
| | | | | | D80168, AW375405, | | | | | |
| | | | | | AW377671, C14298, | | | | | |
| | | | | | D80268, AI910186, | | | | | |
| | | | | | AW179332, | | | | | |
| | | | | | AW378540, D80132, | | | | | |
| | | | | | AW366296, | | | | | |
| | | | | | AW360844, | | | | | |
| | | | | | AW360817, | | | | | |
| | | | | | AW375406, | | | | | |
| | | | | | AW378534, | | | | | |
| | | | | | AW377672, | | | | | |
| | | | | | AW179023, | | | | | |
| | | | | | AW178905, | | | | | |
| | | | | | AI905856, D80302, | | | | | |
| | | | | | AW378528, D59373, | | | | | |
| | | | | | D51103, AW352171, | | | | | |
| | | | | | Z21582, D80439, | | | | | |
| | | | | | AW377676, | | | | | |
| | | | | | AW178906, | | | | | |
| | | | | | AW352170, | | | | | |
| | | | | | AW177731, | | | | | |
| | | | | | AW179019, | | | | | |
| | | | | | AW170924, | | | | | |
| | | | | | D80247, T11417, | | | | | |
| | | | | | AW179329, | | | | | |
| | | | | | AW177505, | | | | | |
| | | | | | AW179020, | | | | | |
| | | | | | AW360841, | | | | | |
| | | | | | AW378543, | | | | | |
| | | | | | AW178909, | | | | | |
| | | | | | AW177456, | | | | | |
| | | | | | AW360834, | | | | | |
| | | | | | AW178980, | | | | | |
| | | | | | AW177733, | | | | | |
| | | | | | AW352174, | | | | | |
| | | | | | AW178908, | | | | | |
| | | | | | AW178754, | | | | | |
| | | | | | AW179018, | | | | | |
| | | | | | AW378525, D59627, | | | | | |
| | | | | | AI557751, | | | | | |
| | | | | | AW179004, | | | | | |
| | | | | | AA285331, | | | | | |
| | | | | | AW179012, | | | | | |
| | | | | | AW178914, D51097, | | | | | |
| | | | | | AW367967, D80157, | | | | | |
| | | | | | AW177722, | | | | | |
| | | | | | AW177728, D51759, | | | | | |
| | | | | | AI535850, | | | | | |
| | | | | | AW179009, | | | | | |
| | | | | | AW178774, | | | | | |
| | | | | | AW178911, | | | | | |
| | | | | | AW352163, C06015, | | | | | |
| | | | | | D58246, D59503, | | | | | |
| | | | | | AW178983, | | | | | |
| | | | | | AW352120, | | | | | |
| | | | | | AW178781, T48593, | | | | | |
| | | | | | D80258, D58101, | | | | | |
| | | | | | AW177723, | | | | | |
| | | | | | AI525023, D80014, | | | | | |
| | | | | | D59653, AW378533, | | | | | |
| | | | | | AW177508, D45260, | | | | | |
| | | | | | D51213, AA809122, | | | | | |
| | | | | | C14975, C03092, | | | | | |
| | | | | | AW367950, D59317, | | | | | |
| | | | | | AW177497, | | | | | |
| | | | | | AW178986, T03116, | | | | | |
| | | | | | D80064, D45273, | | | | | |
| | | | | | D81111, AI525227, | | | | | |
| | | | | | D51221, AW177734, | | | | | |
| | | | | | AI525925, AA514184, | | | | | |
| | | | | | AI525917, C14227, | | | | | |
| | | | | | C14973, AW378539, | | | | | |
| | | | | | C14344, AI535686, | | | | | |
| | | | | | T02974, D60010, | | | | | |
| | | | | | D59474, AI525920, | | | | | |
| | | | | | C14407, D60214, | | | | | |
| | | | | | AW378542, | | | | | |
| | | | | | AI535961, C14957, | | | | | |
| | | | | | C14046, T03048, | | | | | |
| | | | | | AI525242, A1525235, | | | | | |
| | | | | | AI525912, D31458, | | | | | |
| | | | | | AI525215, C16955, | | | | | |
| | | | | | AW300744, C05763, | | | | | |
| | | | | | Z33452, AI525237, | | | | | |
| | | | | | AI525222, | | | | | |
| | | | | | AW360855, | | | | | |
| | | | | | AJ132110, A84916, | | | | | |
| | | | | | A62300, A62298, | | | | | |
| | | | | | AR018138, | | | | | |
| | | | | | AB028859, | | | | | |
| | | | | | AF058696, X67155, | | | | | |
| | | | | | Y17188, D26022, | | | | | |
| | | | | | A25909, AR008278, | | | | | |
| | | | | | A67220, D89785, | | | | | |
| | | | | | A78862, D34614, | | | | | |
| | | | | | AC007860, D88547, | | | | | |
| | | | | | I82448, X82626, | | | | | |
| | | | | | Y12724, AR025207, | | | | | |
| | | | | | A82595, AR060385, | | | | | |
| | | | | | A94995, AB002449, | | | | | |
| | | | | | AR016808, | | | | | |
| | | | | | AR008443, | | | | | |
| | | | | | AB012117, X68127, | | | | | |
| | | | | | I50126, I50132, | | | | | |
| | | | | | I50128, I50133, | | | | | |
| | | | | | A85396, AR066482, | | | | | |
| | | | | | A44171, AR066488, | | | | | |
| | | | | | AR016514, A85477, | | | | | |
| | | | | | I19525, A86792, | | | | | |
| | | | | | AR060138, A45456, | | | | | |
| | | | | | A26615, AR052274, | | | | | |
| | | | | | U87250, X93549, | | | | | |
| | | | | | Y09669, A43192, | | | | | |
| | | | | | A43190, AR038669, | | | | | |
| | | | | | AR066490, | | | | | |
| | | | | | AR066487, I14842, | | | | | |
| | | | | | A30438, AR054175, | | | | | |
| | | | | | I18367, D88507, | | | | | |
| | | | | | D50010, Y17187, | | | | | |
| | | | | | A63261, X64588, | | | | | |
| | | | | | AR008277, | | | | | |
| | | | | | AR008281, | | | | | |
| | | | | | AR008408, | | | | | |
| | | | | | AR062872, A70867, | | | | | |
| | | | | | AR016691, | | | | | |
| | | | | | AR016690, U46128, | | | | | |
| | | | | | AF135125, I79511, | | | | | |
| | | | | | D13509, A64136, | | | | | |
| | | | | | A68321, AR060133, | | | | | |
| | | | | | U79457, AF123263, | | | | | |
| | | | | | AB033111, | | | | | |
| | | | | | AR032065, | | | | | |
| | | | | | AR060382, | | | | | |
| | | | | | AR064240, | | | | | |
| | | | | | X93535, and | | | | | |
| | | | | | AR008382. | | | | | |
| HODGH04 | 93 | 926255 | 1-617 | 15-631 | C14389, D58283, | | | | | |
| | | | | | D80043, D80391, | | | | | |
| | | | | | D59787, D80253, | | | | | |
| | | | | | D80196, D59467, | | | | | |
| | | | | | D51022, D80366, | | | | | |
| | | | | | D80188, D59859, | | | | | |
| | | | | | D80022, C14331, | | | | | |
| | | | | | D80166, D80195, | | | | | |
| | | | | | D51423, D59619, | | | | | |
| | | | | | D80210, D51799, | | | | | |
| | | | | | D80164, D59275, | | | | | |
| | | | | | D80240, D81030, | | | | | |
| | | | | | D80227, D59927, | | | | | |
| | | | | | D59502, D50995, | | | | | |
| | | | | | D50979, D80212, | | | | | |
| | | | | | D57483, D80219, | | | | | |
| | | | | | C15076, D80269, | | | | | |
| | | | | | D59610, D80038, | | | | | |
| | | | | | AW177440, | | | | | |
| | | | | | AA305409, D59889, | | | | | |
| | | | | | D80193, D80024, | | | | | |
| | | | | | AA305578, D80378, | | | | | |
| | | | | | D80522, D80241, | | | | | |
| | | | | | D81026, D51060, | | | | | |
| | | | | | C14429, D80045, | | | | | |
| | | | | | AW178893, C75259, | | | | | |
| | | | | | D80251, AW179328, | | | | | |
| | | | | | T03269, D80248, | | | | | |
| | | | | | AA514188, | | | | | |
| | | | | | AW378532, C14014, | | | | | |
| | | | | | AW177501, | | | | | |
| | | | | | AW177511, | | | | | |
| | | | | | AA514186, D80133, | | | | | |
| | | | | | AW360811, | | | | | |
| | | | | | AW178762, D58253, | | | | | |
| | | | | | D51250, D80134, | | | | | |
| | | | | | AW377671, | | | | | |
| | | | | | AW178775, | | | | | |
| | | | | | F13647, D80132, | | | | | |
| | | | | | C05695, AW176467, | | | | | |
| | | | | | AW369651, | | | | | |
| | | | | | AW375405, T11417, | | | | | |
| | | | | | D80268, AW352117, | | | | | |
| | | | | | AI910186, | | | | | |
| | | | | | AW179024, | | | | | |
| | | | | | AW352158, | | | | | |
| | | | | | AW366296, D80168, | | | | | |
| | | | | | AW360844, | | | | | |
| | | | | | AW360817, | | | | | |
| | | | | | AW375406, | | | | | |
| | | | | | AW378534, | | | | | |
| | | | | | AW179332, | | | | | |
| | | | | | AW377672, | | | | | |
| | | | | | AW179023, | | | | | |
| | | | | | AW178905, D52291, | | | | | |
| | | | | | D80247, D80302, | | | | | |
| | | | | | AW352171, D80439, | | | | | |
| | | | | | AW377676, | | | | | |
| | | | | | AW178906, | | | | | |
| | | | | | AW352170, | | | | | |
| | | | | | AW177731, | | | | | |
| | | | | | AW178907, | | | | | |
| | | | | | AW179019, | | | | | |
| | | | | | AW179018, D59373, | | | | | |
| | | | | | AI905856, | | | | | |
| | | | | | AW177595, C14407, | | | | | |
| | | | | | AW179020, | | | | | |
| | | | | | AW360841, | | | | | |
| | | | | | AW378528, | | | | | |
| | | | | | AW178909, | | | | | |
| | | | | | AW177456, | | | | | |
| | | | | | AW179329, | | | | | |
| | | | | | AW178980, | | | | | |
| | | | | | AW177733, | | | | | |
| | | | | | AW178908, | | | | | |
| | | | | | AW178754, | | | | | |
| | | | | | AW352174, | | | | | |
| | | | | | AW378540, | | | | | |
| | | | | | AW360834, | | | | | |
| | | | | | AW378525, | | | | | |
| | | | | | AW179004, | | | | | |
| | | | | | AW179012, | | | | | |
| | | | | | AW178114, D51103, | | | | | |
| | | | | | Z21582, AW367967, | | | | | |
| | | | | | D80157, AW177722, | | | | | |
| | | | | | AW177728, | | | | | |
| | | | | | AW378543, | | | | | |
| | | | | | AA809122, D51759, | | | | | |
| | | | | | AW179009, | | | | | |
| | | | | | AW178774, | | | | | |
| | | | | | AW178911, | | | | | |
| | | | | | AW352163, D59627, | | | | | |
| | | | | | D58246, AW352120, | | | | | |
| | | | | | AA285331, | | | | | |
| | | | | | AW178983, C06015, | | | | | |
| | | | | | D51097, AW178781, | | | | | |
| | | | | | D59503, T48593, | | | | | |
| | | | | | D58101, D80258, | | | | | |
| | | | | | AI557751, D80014, | | | | | |
| | | | | | AW177723, D59653, | | | | | |
| | | | | | H67866, D51213, | | | | | |
| | | | | | AW177508, | | | | | |
| | | | | | AI535850, D45260, | | | | | |
| | | | | | AW378533, C14975, | | | | | |
| | | | | | AW367950, H67854, | | | | | |
| | | | | | C03092, C14227, | | | | | |
| | | | | | AW177497, C14975, | | | | | |
| | | | | | AW367950, H67854, | | | | | |
| | | | | | D59474, C14973, | | | | | |
| | | | | | D81111, AI525227, | | | | | |
| | | | | | C14957, AW177734, | | | | | |
| | | | | | T0316, AI525917, | | | | | |
| | | | | | D59317, T02974, | | | | | |
| | | | | | D45273, C14344, | | | | | |
| | | | | | D51221, D50981, | | | | | |
| | | | | | AI525920, AA514184, | | | | | |
| | | | | | AI557774, AI535686, | | | | | |
| | | | | | AI535961, D59551, | | | | | |
| | | | | | C14046, D60214, | | | | | |
| | | | | | AI525912, C04682, | | | | | |
| | | | | | AI525235, T03048, | | | | | |
| | | | | | AW378542, C16955, | | | | | |
| | | | | | H67858, AW378539, | | | | | |
| | | | | | AI525242, AI525925, | | | | | |
| | | | | | Z33452, AI525215, | | | | | |
| | | | | | C05763, AI525222, | | | | | |
| | | | | | AW360855, | | | | | |
| | | | | | AI525237, C14298, | | | | | |
| | | | | | AJ132110, | | | | | |
| | | | | | AR018138, A84916, | | | | | |
| | | | | | A62300, A62298, | | | | | |
| | | | | | AB028859, | | | | | |
| | | | | | AR008278, | | | | | |
| | | | | | AF058696, X67155, | | | | | |
| | | | | | Y17188, D26022, | | | | | |
| | | | | | A25909, A67220, | | | | | |
| | | | | | D89785, A78862, | | | | | |
| | | | | | D34614, D88547, | | | | | |
| | | | | | Y12724, X82626, | | | | | |
| | | | | | AR016808, | | | | | |
| | | | | | AR025207, A82595, | | | | | |
| | | | | | AB002449, A94995, | | | | | |
| | | | | | AR060385, | | | | | |
| | | | | | AR008443, I50126, | | | | | |
| | | | | | I50132, I50128, | | | | | |
| | | | | | I50133, AB012117, | | | | | |
| | | | | | AR066488, | | | | | |
| | | | | | AR016514, | | | | | |
| | | | | | AR060138, | | | | | |
| | | | | | A45456, A26615, | | | | | |
| | | | | | AR052274, X68127, | | | | | |
| | | | | | Y09669, A85396, | | | | | |
| | | | | | A43192, A43190, | | | | | |
| | | | | | AR038669, | | | | | |
| | | | | | AR066482, | | | | | |
| | | | | | AR066490, A44171, | | | | | |
| | | | | | AR066487, A85477, | | | | | |
| | | | | | A30438, I19525, | | | | | |
| | | | | | A86792, I18367, | | | | | |
| | | | | | D88507, I14842, | | | | | |
| | | | | | AR054175, X93549, | | | | | |
| | | | | | D50010, Y17187, | | | | | |
| | | | | | A63261, AR008277, | | | | | |
| | | | | | AR008281, X64588, | | | | | |
| | | | | | AR008408, | | | | | |
| | | | | | AR062872, A70867, | | | | | |
| | | | | | AR016691, | | | | | |
| | | | | | AR016690, U46128, | | | | | |
| | | | | | D13509, A64136, | | | | | |
| | | | | | A68321, AR060133, | | | | | |
| | | | | | I79511, AF135125, | | | | | |
| | | | | | U79457, AF123263, | | | | | |
| | | | | | X72378, and | | | | | |
| | | | | | AR008382. | | | | | |
| HODGH07 | 94 | 951933 | 1-538 | 15-552 | AI686005, | | | | | |
| | | | | | and AI658703. | | | | | |
| HODGH11 | 95 | 965105 | 1-631 | 15-645 | AL050320. | | | | | |
| HODGI08 | 96 | 958235 | 1-253 | 15-267 | | | | | | |
| HODGJ67 | 97 | 974297 | 1-520 | 15-534 | | | | | | |
| HODGM46 | 98 | 974051 | 1-1000 | 15- | AW407007, | | | | | |
| | | | | 1014 | AI125143, AA847341, | | | | | |
| | | | | | AA847341, | | | | | |
| | | | | | AL044966, | | | | | |
| | | | | | AA837771, | | | | | |
| | | | | | AA582746, | | | | | |
| | | | | | AA557945, | | | | | |
| | | | | | AA610255, | | | | | |
| | | | | | AA368329, AI732911, | | | | | |
| | | | | | F35684, AA579082, | | | | | |
| | | | | | AA522864, R67701, | | | | | |
| | | | | | AI459879, AA635150, | | | | | |
| | | | | | AI633386, F26395, | | | | | |
| | | | | | AW021674 | | | | | |
| | | | | | AW028376 | | | | | |
| | | | | | AI468993, F00937, | | | | | |
| | | | | | AA846046, | | | | | |
| | | | | | AA640563, | | | | | |
| | | | | | AW304580, | | | | | |
| | | | | | AI251024, AA354868, | | | | | |
| | | | | | AA158549, AI370470, | | | | | |
| | | | | | AW275432, | | | | | |
| | | | | | AI445699, AI538404, | | | | | |
| | | | | | AA507990, | | | | | |
| | | | | | AA219166, AI308529, | | | | | |
| | | | | | H47461, W69639, | | | | | |
| | | | | | AA825954, AI367551, | | | | | |
| | | | | | W45215, AA610644, | | | | | |
| | | | | | AA015948, | | | | | |
| | | | | | AW407679, | | | | | |
| | | | | | AA506734, AI636734, | | | | | |
| | | | | | AI572680, AA507291, | | | | | |
| | | | | | AA351868, | | | | | |
| | | | | | AA569206, AI246386, | | | | | |
| | | | | | AA368659, R79396, | | | | | |
| | | | | | AA935827, | | | | | |
| | | | | | AW238016, | | | | | |
| | | | | | AA578245, | | | | | |
| | | | | | AL135490, | | | | | |
| | | | | | AW196288, | | | | | |
| | | | | | AI828721, AI5209S4, | | | | | |
| | | | | | AA661590, | | | | | |
| | | | | | AW029626, W45416, | | | | | |
| | | | | | AA460786, AI355246, | | | | | |
| | | | | | H29914, H68343, | | | | | |
| | | | | | AI921765, AA155817, | | | | | |
| | | | | | AA219349, F16409, | | | | | |
| | | | | | AI475611, AI888050, | | | | | |
| | | | | | H79277, AI884404, | | | | | |
| | | | | | AA706202, | | | | | |
| | | | | | AW023975, | | | | | |
| | | | | | AI281622, | | | | | |
| | | | | | AW162314, | | | | | |
| | | | | | AA468458, F34151, | | | | | |
| | | | | | AL079894, | | | | | |
| | | | | | AA804694, T03928, | | | | | |
| | | | | | AA132445, AI567676, | | | | | |
| | | | | | AI114494, AI245693, | | | | | |
| | | | | | AA664963, AI434103, | | | | | |
| | | | | | AA349016, | | | | | |
| | | | | | AW162332, | | | | | |
| | | | | | AA362440, | | | | | |
| | | | | | AA831919, | | | | | |
| | | | | | AA557790, | | | | | |
| | | | | | AA225630, N66744, | | | | | |
| | | | | | AI619727, AA582374, | | | | | |
| | | | | | AA828834, | | | | | |
| | | | | | AA778580, | | | | | |
| | | | | | AA650528, | | | | | |
| | | | | | AA719523, AI250552, | | | | | |
| | | | | | T40838, AI251034, | | | | | |
| | | | | | AI254770, AI284543, | | | | | |
| | | | | | AA664126, AI350189, | | | | | |
| | | | | | AI054090, AA715508, | | | | | |
| | | | | | AA714011, | | | | | |
| | | | | | AA385094, H78984, | | | | | |
| | | | | | AW020682, | | | | | |
| | | | | | AA176476, | | | | | |
| | | | | | AA828840, | | | | | |
| | | | | | AW023390, | | | | | |
| | | | | | AI925588, AI733717, | | | | | |
| | | | | | AI523356, | | | | | |
| | | | | | AW151018, Z36862, | | | | | |
| | | | | | AI337612, AI564209, | | | | | |
| | | | | | F24745, AA364147, | | | | | |
| | | | | | T94394, AL134940, | | | | | |
| | | | | | T05617, W27084, | | | | | |
| | | | | | AI053978, | | | | | |
| | | | | | AW407889, | | | | | |
| | | | | | AA226532, T15890, | | | | | |
| | | | | | T40853, AI251284, | | | | | |
| | | | | | AI251203, AI193417, | | | | | |
| | | | | | AI223626, | | | | | |
| | | | | | AW020150, H81406, | | | | | |
| | | | | | AA358531, | | | | | |
| | | | | | AA749196, AI537368, | | | | | |
| | | | | | AI249853, AI221027, | | | | | |
| | | | | | AA599423, AI963816, | | | | | |
| | | | | | AI702049, AI339725, | | | | | |
| | | | | | AI694154, AI246061, | | | | | |
| | | | | | T50676, F34157, | | | | | |
| | | | | | AI348780, AC004253, | | | | | |
| | | | | | AC005913, U47924, | | | | | |
| | | | | | AL109952, | | | | | |
| | | | | | AC007201, Z85987, | | | | | |
| | | | | | AC004587, | | | | | |
| | | | | | AC004973, | | | | | |
| | | | | | AL031447, | | | | | |
| | | | | | AL022578, | | | | | |
| | | | | | AC005067, | | | | | |
| | | | | | AC007030, | | | | | |
| | | | | | AL049735, | | | | | |
| | | | | | AC007204, | | | | | |
| | | | | | AC007285, | | | | | |
| | | | | | AC003109, | | | | | |
| | | | | | AP000692, | | | | | |
| | | | | | AC005914, | | | | | |
| | | | | | AC002369, | | | | | |
| | | | | | AL133163, | | | | | |
| | | | | | AC007637, | | | | | |
| | | | | | AD000864, | | | | | |
| | | | | | AC005971, | | | | | |
| | | | | | AC007792, | | | | | |
| | | | | | AC007193, | | | | | |
| | | | | | AC004079, | | | | | |
| | | | | | AC005726, Z82201, | | | | | |
| | | | | | AC005021, | | | | | |
| | | | | | AC005015, | | | | | |
| | | | | | AC008929, | | | | | |
| | | | | | AC006539, | | | | | |
| | | | | | AC005317, Z84466, | | | | | |
| | | | | | AF031078, | | | | | |
| | | | | | AC004264, | | | | | |
| | | | | | AC002126, | | | | | |
| | | | | | AF030876, | | | | | |
| | | | | | AC005197, | | | | | |
| | | | | | AC004598, | | | | | |
| | | | | | AL035450, | | | | | |
| | | | | | AL110122, | | | | | |
| | | | | | AC006597, | | | | | |
| | | | | | AC004796, | | | | | |
| | | | | | AC002091, | | | | | |
| | | | | | AC007390, | | | | | |
| | | | | | AL133245, | | | | | |
| | | | | | AB017602, | | | | | |
| | | | | | AL022313, | | | | | |
| | | | | | AC004491, | | | | | |
| | | | | | AL031666, Z81364, | | | | | |
| | | | | | Z82248, AC005800, | | | | | |
| | | | | | AC002549, | | | | | |
| | | | | | AL117354, | | | | | |
| | | | | | AL021407, | | | | | |
| | | | | | AL034420, | | | | | |
| | | | | | AC003041, | | | | | |
| | | | | | AC002077, | | | | | |
| | | | | | AC006071, | | | | | |
| | | | | | AC004106, | | | | | |
| | | | | | AC005291, | | | | | |
| | | | | | AP000502, | | | | | |
| | | | | | AL049761, | | | | | |
| | | | | | AP000696, U73634, | | | | | |
| | | | | | AL049869, | | | | | |
| | | | | | AL049776, | | | | | |
| | | | | | AC005214, | | | | | |
| | | | | | AL117258, | | | | | |
| | | | | | AC005566, | | | | | |
| | | | | | AC005765, | | | | | |
| | | | | | AL008724, | | | | | |
| | | | | | AC003030, | | | | | |
| | | | | | AC000159, | | | | | |
| | | | | | AL033538, | | | | | |
| | | | | | AC004881, | | | | | |
| | | | | | AC007395, | | | | | |
| | | | | | AC004895, | | | | | |
| | | | | | AC004812, | | | | | |
| | | | | | AC002107, | | | | | |
| | | | | | AL008712, | | | | | |
| | | | | | AL035422, | | | | | |
| | | | | | AL031848, Z98950, | | | | | |
| | | | | | AC005746, | | | | | |
| | | | | | AC007371, | | | | | |
| | | | | | AC005531, | | | | | |
| | | | | | AC005046, | | | | | |
| | | | | | AF139813, | | | | | |
| | | | | | AC005793, | | | | | |
| | | | | | AL031904, | | | | | |
| | | | | | AC005900, | | | | | |
| | | | | | AL135783, | | | | | |
| | | | | | AC007277, | | | | | |
| | | | | | AL133353, | | | | | |
| | | | | | AC006581, | | | | | |
| | | | | | AC005887, | | | | | |
| | | | | | AC000004, | | | | | |
| | | | | | AL121852, | | | | | |
| | | | | | AL034417, | | | | | |
| | | | | | AP000511, | | | | | |
| | | | | | AC006130, M87912, | | | | | |
| | | | | | AC000082, | | | | | |
| | | | | | AC004844, | | | | | |
| | | | | | AC005601, | | | | | |
| | | | | | AC004228, | | | | | |
| | | | | | AL031258, | | | | | |
| | | | | | AC005696, | | | | | |
| | | | | | AP000116, | | | | | |
| | | | | | AC005921, | | | | | |
| | | | | | AL122020, | | | | | |
| | | | | | AC002350, | | | | | |
| | | | | | AC003692, | | | | | |
| | | | | | AC004762, | | | | | |
| | | | | | AF146024, | | | | | |
| | | | | | AC006531, Z97630, | | | | | |
| | | | | | AL049591, | | | | | |
| | | | | | AL049729, | | | | | |
| | | | | | AC004942, | | | | | |
| | | | | | AC002302, | | | | | |
| | | | | | AC006163, | | | | | |
| | | | | | AC004859, Z85996, | | | | | |
| | | | | | AL049872, | | | | | |
| | | | | | AL022336, | | | | | |
| | | | | | AC005736, | | | | | |
| | | | | | AF064019, | | | | | |
| | | | | | AL049610, | | | | | |
| | | | | | AC006275, | | | | | |
| | | | | | AC006222, | | | | | |
| | | | | | AC000353, | | | | | |
| | | | | | AF217403, Z68165, | | | | | |
| | | | | | AC005763, D87018, | | | | | |
| | | | | | AP000268, AP000103, | | | | | |
| | | | | | AP000033, Z85999, | | | | | |
| | | | | | AC004706, | | | | | |
| | | | | | AC002073, | | | | | |
| | | | | | AC007993, | | | | | |
| | | | | | AL078463, | | | | | |
| | | | | | AL022721, U91318, | | | | | |
| | | | | | AP000089, AP000142, | | | | | |
| | | | | | AL049759, | | | | | |
| | | | | | AL121915, Z93020, | | | | | |
| | | | | | AC003025, | | | | | |
| | | | | | AC006561, | | | | | |
| | | | | | AL080245, Z98750, | | | | | |
| | | | | | AL118516, | | | | | |
| | | | | | AP000503, | | | | | |
| | | | | | AL133312, | | | | | |
| | | | | | AC005832, | | | | | |
| | | | | | AJ243213, | | | | | |
| | | | | | AP000952, Y18762, | | | | | |
| | | | | | AL049839, | | | | | |
| | | | | | AC004904, | | | | | |
| | | | | | AC005940, | | | | | |
| | | | | | AC005081, Z95118, | | | | | |
| | | | | | Z93017, AC007225, | | | | | |
| | | | | | AC005952, | | | | | |
| | | | | | AL022311, | | | | | |
| | | | | | AC005962, Z97633, | | | | | |
| | | | | | AC004843, | | | | | |
| | | | | | AC005859, | | | | | |
| | | | | | AP000008, AP000704, | | | | | |
| | | | | | AC006287, | | | | | |
| | | | | | AL008707, | | | | | |
| | | | | | AC006014, | | | | | |
| | | | | | AC006077, | | | | | |
| | | | | | AC004408, | | | | | |
| | | | | | AP000243, AP000203, | | | | | |
| | | | | | AF196972, | | | | | |
| | | | | | AC006251, | | | | | |
| | | | | | AL034548, | | | | | |
| | | | | | AC007376, D87675, | | | | | |
| | | | | | K00061, AL049611, | | | | | |
| | | | | | AC002463, | | | | | |
| | | | | | AL050308, Z83848, | | | | | |
| | | | | | AL031685, | | | | | |
| | | | | | AL050348, | | | | | |
| | | | | | AP000030, | | | | | |
| | | | | | AC004522, | | | | | |
| | | | | | AL110200, | | | | | |
| | | | | | AC016025, | | | | | |
| | | | | | AC005288, Z95116, | | | | | |
| | | | | | AL050348, | | | | | |
| | | | | | AC005697, | | | | | |
| | | | | | AL031733, | | | | | |
| | | | | | AL031733, | | | | | |
| | | | | | AL024498, | | | | | |
| | | | | | AC004616, | | | | | |
| | | | | | AC006946, | | | | | |
| | | | | | AC002418, | | | | | |
| | | | | | AL034423, | | | | | |
| | | | | | AC003029, | | | | | |
| | | | | | AC003098, | | | | | |
| | | | | | AL022331, | | | | | |
| | | | | | AL023575, | | | | | |
| | | | | | AC005532, | | | | | |
| | | | | | AL096702, | | | | | |
| | | | | | AL035659, | | | | | |
| | | | | | AC006057, U02052, | | | | | |
| | | | | | AC003969, U52427, | | | | | |
| | | | | | AC005828, | | | | | |
| | | | | | AL031433, | | | | | |
| | | | | | AL096757, | | | | | |
| | | | | | AL049838, | | | | | |
| | | | | | AL031291, | | | | | |
| | | | | | AL035249, | | | | | |
| | | | | | AC005072, | | | | | |
| | | | | | AL021154, | | | | | |
| | | | | | AL035420, L78810, | | | | | |
| | | | | | U52112, AL136363, | | | | | |
| | | | | | AL031803, AC007388, | | | | | |
| | | | | | AL135879, | | | | | |
| | | | | | AL121790, U29953, | | | | | |
| | | | | | AL024494, Z78021, | | | | | |
| | | | | | AC004156, | | | | | |
| | | | | | AP001063, | | | | | |
| | | | | | AC005379, | | | | | |
| | | | | | AC005775, | | | | | |
| | | | | | and AC005074. | | | | | |
| HODGO46 | 99 | 883087 | 1-599 | 15-613 | | | | | | |
| HODGP37 | 100 | 974293 | 1-552 | 15-566 | AF152364. | | | | | |
| HODGP83 | 101 | 889967 | 1-223 | 15-237 | | | | | | |
| HODGP95 | 102 | 908650 | 1-345 | 15-359 | AC005189. | | | | | |
| HODGQ08 | 103 | 958237 | 1-390 | 15-404 | | | | | | |
| HODGQ22 | 104 | 974290 | 1-527 | 15-541 | | | | | | |
| HODGQ32 | 105 | 974294 | 1-658 | 15-672 | | | | | | |
| HODGQ92 | 106 | 894368 | 1-392 | 15-406 | AW369682, | | | | | |
| | | | | | and AB018255. | | | | | |
| HODGT62 | 107 | 974052 | 1-547 | 15-561 | | | | | | |
| HODGW08 | 108 | 958277 | 1-553 | 15-567 | | | | | | |
| HODGX10 | 109 | 963427 | 1-313 | 15-327 | Z84478. | | | | | |
| HODGX29 | 110 | 913879 | 1-256 | 15-270 | AC006017. | | | | | |
| HODGZ06 | 111 | 933783 | 1-488 | 15-502 | AC007685, | | | | | |
| | | | | | and AC007284. | | | | | |
| HODGZ10 | 112 | 961977 | 1-460 | 15-474 | | | | | | |
| HODHC03 | 113 | 922987 | 1-597 | 15-611 | AI284176, AI907957, | | | | | |
| | | | | | and U73642 | | | | | |
| HODHG71 | 114 | 926203 | 1-533 | 15-547 | | | | | | |
| HODHK02 | 115 | 918613 | 1-289 | 15-303 | | | | | | |
| HODHL19 | 116 | 973433 | 1-588 | 15-602 | AC005083. | | | | | |
| HODHO11 | 117 | 965529 | 1-270 | 15-284 | | | | | | |
| HODHS34 | 118 | 965460 | 1-497 | 15-511 | | | | | | |
| HODHY53 | 119 | 914554 | 1-663 | 15-677 | | | | | | |
| HODJR03 | 120 | 922484 | 1-537 | 15-551 | AC004804. | | | | | |
| HODJY33 | 121 | 951404 | 1-609 | 15-623 | H04619, AW089973, | | | | | |
| | | | | | AW002729, | | | | | |
| | | | | | AA584259, AI147246, | | | | | |
| | | | | | AA196770, and | | | | | |
| | | | | | AC007279. | | | | | |
| HODJZ90 | 122 | 965049 | 1-250 | 15-264 | | | | | | |
| HODKN07 | 123 | 933320 | 1-620 | 15-634 | L44297. | | | | | |
| HOVJA10 | 124 | 961467 | 1-430 | 15-444 | | | | | | |
| HPCPF05 | 125 | 927168 | 1-525 | 15-539 | AW294804, | | | | | |
| | | | | | AI193110, AI300529, | | | | | |
| | | | | | AI336265, AI160012, | | | | | |
| | | | | | AA029612, AI832813, | | | | | |
| | | | | | AA722195, | | | | | |
| | | | | | AA121508, AI860181, | | | | | |
| | | | | | AI141465, AI570532, | | | | | |
| | | | | | AI857944, R32118, | | | | | |
| | | | | | AA099271, AI096365, | | | | | |
| | | | | | AI342221, AI808491, | | | | | |
| | | | | | AI862033, AI559677, | | | | | |
| | | | | | AW023430, | | | | | |
| | | | | | AI361255, AI371048, | | | | | |
| | | | | | AA865682, AA748042, | | | | | |
| | | | | | AI336001, | | | | | |
| | | | | | AW022229, | | | | | |
| | | | | | AI359397, AA026111, | | | | | |
| | | | | | AA115634, AI431331, | | | | | |
| | | | | | AI911906, AI680468, | | | | | |
| | | | | | W93126, AI954960, | | | | | |
| | | | | | AW088396, | | | | | |
| | | | | | AI190286, AI346804, | | | | | |
| | | | | | AI130942, AI091483, | | | | | |
| | | | | | AW189276, | | | | | |
| | | | | | AA688307, AI189025, | | | | | |
| | | | | | AI767694, AI799469, | | | | | |
| | | | | | AW380356, | | | | | |
| | | | | | AA807668, AI354954, | | | | | |
| | | | | | AW380375, | | | | | |
| | | | | | AA043929, | | | | | |
| | | | | | AW022523, W02100, | | | | | |
| | | | | | AI301595, AI202850, | | | | | |
| | | | | | AW380384, H99705, | | | | | |
| | | | | | AI982790, | | | | | |
| | | | | | AW237470, R65725, | | | | | |
| | | | | | AA098892, | | | | | |
| | | | | | AA470877, R24056, | | | | | |
| | | | | | AA564293, AI651164, | | | | | |
| | | | | | AW271629, | | | | | |
| | | | | | AW380377, | | | | | |
| | | | | | AA853830, T17200, | | | | | |
| | | | | | AA468597, AI651187, | | | | | |
| | | | | | R79227, AI686761, | | | | | |
| | | | | | AI805208, AA873325, | | | | | |
| | | | | | AI077608, R32496, | | | | | |
| | | | | | N80064, AI758913, | | | | | |
| | | | | | C00620, AI214710, | | | | | |
| | | | | | AI783865, | | | | | |
| | | | | | AW380370, | | | | | |
| | | | | | AA127733, N91757, | | | | | |
| | | | | | R65726, AI689514, | | | | | |
| | | | | | AI687869, W07026, | | | | | |
| | | | | | W00844, AP000315, | | | | | |
| | | | | | AP000165, and | | | | | |
| | | | | | AP000118. | | | | | |
| HPCPO07 | 126 | 951826 | 1-289 | 15-303 | | | | | | |
| HPDOY06 | 127 | 929318 | 1-243 | 15-257 | | | | | | |
| HPDPK12 | 128 | 969340 | 1-304 | 15-318 | AA424185, R07403, | | | | | |
| | | | | | AI074550, AI074543, | | | | | |
| | | | | | AA829693, | | | | | |
| | | | | | AA603234, M77858, | | | | | |
| | | | | | H56912, AA193445, | | | | | |
| | | | | | AA640755, | | | | | |
| | | | | | AA296002, N72812, | | | | | |
| | | | | | AI803827, N63746, | | | | | |
| | | | | | T85040, AA346355, | | | | | |
| | | | | | AA865344, W37250, | | | | | |
| | | | | | AW245054, | | | | | |
| | | | | | AA278641, AI803791, | | | | | |
| | | | | | AA669238, AI708384, | | | | | |
| | | | | | W42997, AW075979, | | | | | |
| | | | | | N71033, T63772, | | | | | |
| | | | | | AA189154, | | | | | |
| | | | | | R43401, AA837708, | | | | | |
| | | | | | C14614, AW073510, | | | | | |
| | | | | | R65651, AA504561, | | | | | |
| | | | | | AW438765, | | | | | |
| | | | | | AI473581, AA740297, | | | | | |
| | | | | | AI224583, AA282951, | | | | | |
| | | | | | AI049845, AI027056, | | | | | |
| | | | | | AI689695, AI192839, | | | | | |
| | | | | | AW151713, | | | | | |
| | | | | | AI554399, N22797, | | | | | |
| | | | | | AA657505, | | | | | |
| | | | | | AA129133, | | | | | |
| | | | | | AA088727, | | | | | |
| | | | | | AA830594, | | | | | |
| | | | | | AA569474, | | | | | |
| | | | | | AA586661, T92947, | | | | | |
| | | | | | AI821239, | | | | | |
| | | | | | AW150476, | | | | | |
| | | | | | AI350189, AI611331, | | | | | |
| | | | | | AI421257, AI362442, | | | | | |
| | | | | | H65404, AW342029, | | | | | |
| | | | | | AW166879, | | | | | |
| | | | | | AI340280, AI433131, | | | | | |
| | | | | | AW440315, | | | | | |
| | | | | | AI761120, AI342863, | | | | | |
| | | | | | AA974503, AI611736, | | | | | |
| | | | | | AA748913, | | | | | |
| | | | | | AA483211, | | | | | |
| | | | | | AW082470, | | | | | |
| | | | | | AA299220, C05714, | | | | | |
| | | | | | AA526630, H73230, | | | | | |
| | | | | | AI702522, AI791336, | | | | | |
| | | | | | AA532594, Z83822, | | | | | |
| | | | | | AC007676, | | | | | |
| | | | | | AL078593, | | | | | |
| | | | | | AL117338, | | | | | |
| | | | | | AL110161, | | | | | |
| | | | | | AC004070, | | | | | |
| | | | | | AC002412, | | | | | |
| | | | | | AC005911, | | | | | |
| | | | | | AL109853, | | | | | |
| | | | | | AL049759, | | | | | |
| | | | | | AC006115, | | | | | |
| | | | | | AC005944, | | | | | |
| | | | | | AC004750, | | | | | |
| | | | | | AC004647, | | | | | |
| | | | | | AL049776, | | | | | |
| | | | | | AC005060, | | | | | |
| | | | | | AD000833, | | | | | |
| | | | | | AL096766, | | | | | |
| | | | | | AC004149, | | | | | |
| | | | | | AL078644, | | | | | |
| | | | | | AC002563, | | | | | |
| | | | | | AC005519, | | | | | |
| | | | | | AC009247, | | | | | |
| | | | | | AC007461, | | | | | |
| | | | | | AL133445, Z93242, | | | | | |
| | | | | | Z97056, AC005682, | | | | | |
| | | | | | AC004771, | | | | | |
| | | | | | Z82180, AF003626, | | | | | |
| | | | | | AC008044, | | | | | |
| | | | | | AL035667, | | | | | |
| | | | | | AL009179, U52112, | | | | | |
| | | | | | AC006265, | | | | | |
| | | | | | AL135744, | | | | | |
| | | | | | AP000959, | | | | | |
| | | | | | AL022313, | | | | | |
| | | | | | AP000011, | | | | | |
| | | | | | AL132712, | | | | | |
| | | | | | AC009178, | | | | | |
| | | | | | AC007790, | | | | | |
| | | | | | AC006597, | | | | | |
| | | | | | AC007546, U95742, | | | | | |
| | | | | | AC007216, | | | | | |
| | | | | | AC000088, | | | | | |
| | | | | | AC000082, | | | | | |
| | | | | | AC003037, | | | | | |
| | | | | | AC006511, | | | | | |
| | | | | | AC006197, | | | | | |
| | | | | | AL035400, | | | | | |
| | | | | | AL079295, | | | | | |
| | | | | | AR060469, | | | | | |
| | | | | | AC006140, | | | | | |
| | | | | | AB023052, | | | | | |
| | | | | | AC005933, Z82976, | | | | | |
| | | | | | AC004559, | | | | | |
| | | | | | AC005943, Z84721, | | | | | |
| | | | | | AL050306, | | | | | |
| | | | | | AL023575, | | | | | |
| | | | | | AC006974, | | | | | |
| | | | | | AP000513, | | | | | |
| | | | | | AL050341, | | | | | |
| | | | | | AC005004, | | | | | |
| | | | | | AC005281, | | | | | |
| | | | | | AC004796, | | | | | |
| | | | | | AL034408, | | | | | |
| | | | | | AC004686, | | | | | |
| | | | | | AC006571, | | | | | |
| | | | | | AC004126, | | | | | |
| | | | | | AC007425, | | | | | |
| | | | | | AL031848, | | | | | |
| | | | | | AF064862, | | | | | |
| | | | | | AC002553, Z83844, | | | | | |
| | | | | | AP000555, | | | | | |
| | | | | | AC005618, | | | | | |
| | | | | | AL110505, | | | | | |
| | | | | | AC005037, | | | | | |
| | | | | | AC004893, | | | | | |
| | | | | | AC005150, | | | | | |
| | | | | | AF141309, | | | | | |
| | | | | | AC005544, | | | | | |
| | | | | | AC004655, | | | | | |
| | | | | | AC006001, | | | | | |
| | | | | | AC005089, S77127, | | | | | |
| | | | | | AB023049, | | | | | |
| | | | | | AC004188, | | | | | |
| | | | | | AL021807, | | | | | |
| | | | | | AC006071, | | | | | |
| | | | | | AP000516, | | | | | |
| | | | | | AL035659, | | | | | |
| | | | | | AC003663, | | | | | |
| | | | | | AC007666, | | | | | |
| | | | | | AF159056, | | | | | |
| | | | | | AC007214, | | | | | |
| | | | | | AC006033, | | | | | |
| | | | | | AC003080, | | | | | |
| | | | | | AF111169, | | | | | |
| | | | | | AC000052, | | | | | |
| | | | | | AC004019, | | | | | |
| | | | | | AJ011930, | | | | | |
| | | | | | AC007051, | | | | | |
| | | | | | AF001552, | | | | | |
| | | | | | AC003982, | | | | | |
| | | | | | AC007919, | | | | | |
| | | | | | AC003953, | | | | | |
| | | | | | AC007685, | | | | | |
| | | | | | AC0O5666, M87896, | | | | | |
| | | | | | AL022324, U63630, | | | | | |
| | | | | | AP000302, | | | | | |
| | | | | | AC000073, | | | | | |
| | | | | | AC006162, M89651, | | | | | |
| | | | | | AC004073, | | | | | |
| | | | | | AC005183, | | | | | |
| | | | | | AL023578, Z98752, | | | | | |
| | | | | | AP000114, AP000046, | | | | | |
| | | | | | AP000141, | | | | | |
| | | | | | AC000085, | | | | | |
| | | | | | AL031133, | | | | | |
| | | | | | AC006539, | | | | | |
| | | | | | AC004150, | | | | | |
| | | | | | AP001054, | | | | | |
| | | | | | AC002477, | | | | | |
| | | | | | AC006236, | | | | | |
| | | | | | AC004659, | | | | | |
| | | | | | AF001548, | | | | | |
| | | | | | AC006036, | | | | | |
| | | | | | AL133353, | | | | | |
| | | | | | AC004832, | | | | | |
| | | | | | AP000088, | | | | | |
| | | | | | AC006116, | | | | | |
| | | | | | AC004386, | | | | | |
| | | | | | AL031283, | | | | | |
| | | | | | AC006249, | | | | | |
| | | | | | AC005291, | | | | | |
| | | | | | AC003106, | | | | | |
| | | | | | AB003151, | | | | | |
| | | | | | AP000688, | | | | | |
| | | | | | AC005386, | | | | | |
| | | | | | AC005841, | | | | | |
| | | | | | AL049576, | | | | | |
| | | | | | AP000509, | | | | | |
| | | | | | AC006261, | | | | | |
| | | | | | AC000075, | | | | | |
| | | | | | AC005885, | | | | | |
| | | | | | AL034555, | | | | | |
| | | | | | AL031670, | | | | | |
| | | | | | AC004020, | | | | | |
| | | | | | AF165926, | | | | | |
| | | | | | AC006199, | | | | | |
| | | | | | AL021917, | | | | | |
| | | | | | AC007344, | | | | | |
| | | | | | AC007344, | | | | | |
| | | | | | AC003101, | | | | | |
| | | | | | AC004526, | | | | | |
| | | | | | AC002544, | | | | | |
| | | | | | AL109963, | | | | | |
| | | | | | AF196970, | | | | | |
| | | | | | AC005082, | | | | | |
| | | | | | AL096791, D86995, | | | | | |
| | | | | | AC002316, | | | | | |
| | | | | | AC007283, | | | | | |
| | | | | | AC007207, | | | | | |
| | | | | | AC005664, | | | | | |
| | | | | | AC003108, | | | | | |
| | | | | | AC005369, | | | | | |
| | | | | | AC002454, | | | | | |
| | | | | | AC004820, L44140, | | | | | |
| | | | | | U78027, Z97206, | | | | | |
| | | | | | AL035422, | | | | | |
| | | | | | AC003071, | | | | | |
| | | | | | AC007556, | | | | | |
| | | | | | AC006461, | | | | | |
| | | | | | AC007537, | | | | | |
| | | | | | AL031255, | | | | | |
| | | | | | AL121653, | | | | | |
| | | | | | AC004017, and | | | | | |
| | | | | | AC002039. | | | | | |
| HPDPQ40 | 129 | 922464 | 1-615 | 15-629 | AI911379, AI382036, | | | | | |
| | | | | | AI523065, AI567528, | | | | | |
| | | | | | AA628532, AI359162, | | | | | |
| | | | | | AI356788, AA483453, | | | | | |
| | | | | | AA483438, AI811858, | | | | | |
| | | | | | and T07668. | | | | | |
| HPDQO05 | 130 | 929274 | 1-1104 | 15- | AI023890, AI744865, | | | | | |
| | | | | 1118 | AI961389, AA694270, | | | | | |
| | | | | | and AA778846. | | | | | |
| HPDRD28 | 131 | 957791 | 1-498 | 15-512 | AI803130. | | | | | |
| HPDRG92 | 132 | 967704 | 1-347 | 15-361 | T96738, R90778, | | | | | |
| | | | | | H47758, R94024, | | | | | |
| | | | | | AA323896, N51812, | | | | | |
| | | | | | and AB033116. | | | | | |
| HPDRO20 | 133 | 957678 | 1-208 | 15-222 | AI925316, C20550, | | | | | |
| | | | | | and AW383499. | | | | | |
| HPDVE05 | 134 | 928647 | 1-828 | 15-842 | AA621983, AI738475, | | | | | |
| | | | | | AI380189, AI127232, | | | | | |
| | | | | | AA622706, | | | | | |
| | | | | | AW204003, | | | | | |
| | | | | | AA621975, AI587036, | | | | | |
| | | | | | AA665743, AI692234, | | | | | |
| | | | | | AI249654, AI246971, | | | | | |
| | | | | | AI246864, | | | | | |
| | | | | | AW268783, | | | | | |
| | | | | | AI692219, AI002242, | | | | | |
| | | | | | AW137282, | | | | | |
| | | | | | AW295910, | | | | | |
| | | | | | AI308015, AI318288, | | | | | |
| | | | | | AW301462, | | | | | |
| | | | | | AI246934, | | | | | |
| | | | | | AW268311, | | | | | |
| | | | | | AI345591, AI246816, | | | | | |
| | | | | | AI318117, | | | | | |
| | | | | | AW301382, | | | | | |
| | | | | | AI311495, AI610947, | | | | | |
| | | | | | AI252418, | | | | | |
| | | | | | AW086332, | | | | | |
| | | | | | AI251546, AI792842, | | | | | |
| | | | | | AI792856, AI345144, | | | | | |
| | | | | | AW072879, | | | | | |
| | | | | | AI313327, AJ223366, | | | | | |
| | | | | | AI249650, | | | | | |
| | | | | | and AI318575. | | | | | |
| HPDVK12 | 135 | 968977 | 1-560 | 15-574 | AI148863, AI765291, | | | | | |
| | | | | | N70646, AI914033, | | | | | |
| | | | | | AI458020, AA551814, | | | | | |
| | | | | | AI311395, | | | | | |
| | | | | | and AW175659. | | | | | |
| HPDVY17 | 136 | 955902 | 1-432 | 15-446 | | | | | | |
| HVCAZ38 | 137 | 969208 | 1- | 15-1165 | AA477501, | | | | | |
| | | | 1151 | AA479873, | | | | | | |
| | | | | | AI003611, | | | | | |
| | | | | | AW270619, | | | | | |
| | | | | | AI755214, AI754567, | | | | | |
| | | | | | AA584489, AI754105, | | | | | |
| | | | | | AI754105, AI783911, | | | | | |
| | | | | | AI962030, AA904275, | | | | | |
| | | | | | AI620585, AI570943, | | | | | |
| | | | | | AA779783, AA262752, | | | | | |
| | | | | | AA013168, | | | | | |
| | | | | | AW277253, | | | | | |
| | | | | | AL079734, | | | | | |
| | | | | | AA582554, | | | | | |
| | | | | | AA535216, | | | | | |
| | | | | | AA019973, AI491765, | | | | | |
| | | | | | AI872216, | | | | | |
| | | | | | AW439703, D26361, | | | | | |
| | | | | | AP000493, | | | | | |
| | | | | | AC007938, | | | | | |
| | | | | | AC007938, | | | | | |
| | | | | | AC004019, | | | | | |
| | | | | | AC006210, | | | | | |
| | | | | | AC003957, U47924, | | | | | |
| | | | | | AF106564, | | | | | |
| | | | | | AC005529, | | | | | |
| | | | | | AC006077, | | | | | |
| | | | | | AL031311, | | | | | |
| | | | | | AF038458, | | | | | |
| | | | | | AC006312, | | | | | |
| | | | | | AC005578, | | | | | |
| | | | | | AC000052, | | | | | |
| | | | | | AL031680, | | | | | |
| | | | | | AC004150, | | | | | |
| | | | | | AF196779, | | | | | |
| | | | | | AC005694, | | | | | |
| | | | | | AC007666, | | | | | |
| | | | | | AC005295, | | | | | |
| | | | | | AC004895, | | | | | |
| | | | | | AC005368, Z93023, | | | | | |
| | | | | | AC005755, | | | | | |
| | | | | | AC006006, | | | | | |
| | | | | | AF053356, | | | | | |
| | | | | | AC005682, | | | | | |
| | | | | | AC005972, | | | | | |
| | | | | | AC005306, Z82172, | | | | | |
| | | | | | AC005231, | | | | | |
| | | | | | AC005081, | | | | | |
| | | | | | AC007435, | | | | | |
| | | | | | AC004972, U62293, | | | | | |
| | | | | | Z83844, AC004973, | | | | | |
| | | | | | Y18000, AF207550, | | | | | |
| | | | | | AL035361, | | | | | |
| | | | | | AL050306, | | | | | |
| | | | | | AC004236, | | | | | |
| | | | | | AL121655, | | | | | |
| | | | | | AC004686, | | | | | |
| | | | | | AC004999, | | | | | |
| | | | | | AC004812, | | | | | |
| | | | | | AL049766, | | | | | |
| | | | | | AL078587, | | | | | |
| | | | | | AP000152, AP000502, | | | | | |
| | | | | | AC010206, | | | | | |
| | | | | | AB015355, Z99755, | | | | | |
| | | | | | AP000501, | | | | | |
| | | | | | AL121603, | | | | | |
| | | | | | AC003006, | | | | | |
| | | | | | AL034402, | | | | | |
| | | | | | AF111169, | | | | | |
| | | | | | AC005225, | | | | | |
| | | | | | AC005399, | | | | | |
| | | | | | AL034429, | | | | | |
| | | | | | AP001053, | | | | | |
| | | | | | AC002996, | | | | | |
| | | | | | AC007461, | | | | | |
| | | | | | AC005224, | | | | | |
| | | | | | AC005632, | | | | | |
| | | | | | AL049780, Z69917, | | | | | |
| | | | | | AC005535, U91321, | | | | | |
| | | | | | AF109907, | | | | | |
| | | | | | AC007536, Z97183, | | | | | |
| | | | | | Z86090, AL049697, | | | | | |
| | | | | | L44140, AG005520, | | | | | |
| | | | | | AL023575, | | | | | |
| | | | | | AF134726, | | | | | |
| | | | | | AL109657, | | | | | |
| | | | | | AP000365, | | | | | |
| | | | | | AC007546, | | | | | |
| | | | | | AL049776, | | | | | |
| | | | | | AC003035, | | | | | |
| | | | | | AC004531, | | | | | |
| | | | | | AC005264, | | | | | |
| | | | | | AB023051, | | | | | |
| | | | | | AD000092, U85195, | | | | | |
| | | | | | AC006449, | | | | | |
| | | | | | AC003663, | | | | | |
| | | | | | AC007055, U95090, | | | | | |
| | | | | | AC005620, | | | | | |
| | | | | | AC005971, | | | | | |
| | | | | | AC002126, | | | | | |
| | | | | | AC002395, | | | | | |
| | | | | | AC006960, | | | | | |
| | | | | | AL031121, | | | | | |
| | | | | | AC004890, | | | | | |
| | | | | | AE000658, | | | | | |
| | | | | | AC004707, | | | | | |
| | | | | | AC004472, | | | | | |
| | | | | | AC004859, | | | | | |
| | | | | | AC005619, Y14768, | | | | | |
| | | | | | AL022322, AP000512, | | | | | |
| | | | | | Z83826, AC004000, | | | | | |
| | | | | | AL133448, | | | | | |
| | | | | | AL021878, | | | | | |
| | | | | | AJ003147, | | | | | |
| | | | | | AL009181, | | | | | |
| | | | | | AC005089, | | | | | |
| | | | | | AC009516, | | | | | |
| | | | | | AC007283, | | | | | |
| | | | | | AC002404, | | | | | |
| | | | | | AC006512, | | | | | |
| | | | | | AP000350, | | | | | |
| | | | | | AC004131, | | | | | |
| | | | | | AC005914, | | | | | |
| | | | | | AC005102, | | | | | |
| | | | | | AC007308, | | | | | |
| | | | | | AC003029, | | | | | |
| | | | | | AC020663, | | | | | |
| | | | | | AL023803, | | | | | |
| | | | | | AC007327, | | | | | |
| | | | | | AC002350, | | | | | |
| | | | | | AC005245, Z82206, | | | | | |
| | | | | | AC006101, | | | | | |
| | | | | | AC006111, | | | | | |
| | | | | | AL049745, | | | | | |
| | | | | | AC004797, | | | | | |
| | | | | | AC005701, Z71183, | | | | | |
| | | | | | AC005722, | | | | | |
| | | | | | AC006509, | | | | | |
| | | | | | AC003010, | | | | | |
| | | | | | AC006468, | | | | | |
| | | | | | AC007690, | | | | | |
| | | | | | AC008085, | | | | | |
| | | | | | AC006166, | | | | | |
| | | | | | AL049643, | | | | | |
| | | | | | AC004858, | | | | | |
| | | | | | AC000134, Z94801, | | | | | |
| | | | | | AC002365, | | | | | |
| | | | | | AC005790, | | | | | |
| | | | | | AL049539, | | | | | |
| | | | | | AC007263, | | | | | |
| | | | | | AC006120, | | | | | |
| | | | | | AP000359, Z85986, | | | | | |
| | | | | | AC005790, | | | | | |
| | | | | | AL049539, | | | | | |
| | | | | | AC009247, | | | | | |
| | | | | | AL022345, | | | | | |
| | | | | | AC006251, | | | | | |
| | | | | | AC006251, | | | | | |
| | | | | | AC005919, | | | | | |
| | | | | | AC007707, | | | | | |
| | | | | | AL035422, | | | | | |
| | | | | | AC004821, | | | | | |
| | | | | | AC004974, | | | | | |
| | | | | | AC004881, Z99570, | | | | | |
| | | | | | AC004929, U80017, | | | | | |
| | | | | | AC000159, | | | | | |
| | | | | | AC004448, | | | | | |
| | | | | | AF027390, | | | | | |
| | | | | | AC016025, | | | | | |
| | | | | | AC005037, | | | | | |
| | | | | | AP000505, | | | | | |
| | | | | | AL034421, | | | | | |
| | | | | | AL021918, | | | | | |
| | | | | | AL136504, | | | | | |
| | | | | | AL034420, | | | | | |
| | | | | | AC006511, | | | | | |
| | | | | | AL031584, | | | | | |
| | | | | | AC004905, | | | | | |
| | | | | | AL035086, | | | | | |
| | | | | | AP000557, | | | | | |
| | | | | | AF196972, | | | | | |
| | | | | | AC008123, | | | | | |
| | | | | | and AC005736. | | | | | |
| HVCBV04 | 138 | 925844 | 1-618 | 15-632 | | | | | | |
| HVGGG81 | 139 | 933449 | 1-49 | 15-63 | | | | | | |
| HVCCK04 | 140 | 925796 | 1-903 | 15-917 | AA130954, AI826639, | | | | | |
| | | | | | AAI49522, AI625572, | | | | | |
| | | | | | AI452441, AI653591, | | | | | |
| | | | | | AI305234, AI433556, | | | | | |
| | | | | | AI366037, AI076932, | | | | | |
| | | | | | W60508, AI298406, | | | | | |
| | | | | | AW249838, | | | | | |
| | | | | | AA693895, | | | | | |
| | | | | | AA932571, AI248312, | | | | | |
| | | | | | AW136383, | | | | | |
| | | | | | AI420053, | | | | | |
| | | | | | AW250502, | | | | | |
| | | | | | AI216563, AA678309, | | | | | |
| | | | | | AA426066, | | | | | |
| | | | | | AA937788, F31582, | | | | | |
| | | | | | AA340275, | | | | | |
| | | | | | AA204645, R11867, | | | | | |
| | | | | | AI570112, AI692968, | | | | | |
| | | | | | R60411, AI000109, | | | | | |
| | | | | | AA130824, | | | | | |
| | | | | | AA207010, W56198, | | | | | |
| | | | | | AW382487, | | | | | |
| | | | | | AW382451, | | | | | |
| | | | | | AW392670, | | | | | |
| | | | | | AW363220, | | | | | |
| | | | | | AW384394, | | | | | |
| | | | | | AL119443, Z99396, | | | | | |
| | | | | | AL119391, | | | | | |
| | | | | | AL119497, U46351, | | | | | |
| | | | | | U46351, AL119483, | | | | | |
| | | | | | AL119319, U46347, | | | | | |
| | | | | | AL119484, | | | | | |
| | | | | | AL119363, | | | | | |
| | | | | | AL119457, U46346, | | | | | |
| | | | | | U46350, AL119324, | | | | | |
| | | | | | AL042965, | | | | | |
| | | | | | AL119444, | | | | | |
| | | | | | AL119355, | | | | | |
| | | | | | AL119396, | | | | | |
| | | | | | AL119439, U46341, | | | | | |
| | | | | | AL119341, | | | | | |
| | | | | | AL119335, | | | | | |
| | | | | | AL119522, | | | | | |
| | | | | | AL119418, | | | | | |
| | | | | | AL119464, | | | | | |
| | | | | | AR066494, A81671, | | | | | |
| | | | | | AR069079, | | | | | |
| | | | | | AR060234, | | | | | |
| | | | | | AR054110, | | | | | |
| | | | | | and AB026436. | | | | | |
| HVVAC41 | 141 | 949141 | 1-259 | 15-273 | | | | | | |
| HVVAJ06 | 142 | 933675 | 1-375 | 15-389 | | | | | | |
| HVVBG19 | 143 | 968967 | 1-541 | 15-555 | | | | | | |
| HVVBK4S | 144 | 964102 | 1-1441 | 15- | AI751508, | | | | | |
| | | | | 1455 | AW439242, | | | | | |
| | | | | | AI858347, AA954665, | | | | | |
| | | | | | AW173684, | | | | | |
| | | | | | AA639199, | | | | | |
| | | | | | AI633169, | | | | | |
| | | | | | AW304822, | | | | | |
| | | | | | AI828611, AI088904, | | | | | |
| | | | | | AI923258, AI635118, | | | | | |
| | | | | | AI952782, AI683485, | | | | | |
| | | | | | AI635010, AI963627, | | | | | |
| | | | | | AI278264, | | | | | |
| | | | | | AW129973, | | | | | |
| | | | | | AI860650, AI373090, | | | | | |
| | | | | | AA642700, AI860395, | | | | | |
| | | | | | AI982534, AI637577, | | | | | |
| | | | | | AI561081, | | | | | |
| | | | | | AW304817, | | | | | |
| | | | | | AI167846, | | | | | |
| | | | | | AW130866, | | | | | |
| | | | | | AA747281, AI984745, | | | | | |
| | | | | | AW379208, | | | | | |
| | | | | | AI683773, AA587659, | | | | | |
| | | | | | AW058417, | | | | | |
| | | | | | AI267698, AI986135, | | | | | |
| | | | | | AA488133, AI744496, | | | | | |
| | | | | | AI684490, AI559255, | | | | | |
| | | | | | AA488134, AI887129, | | | | | |
| | | | | | AA282616, AI274756, | | | | | |
| | | | | | AA730687, AI472334, | | | | | |
| | | | | | AI492872, | | | | | |
| | | | | | AW150281, | | | | | |
| | | | | | AW169998, | | | | | |
| | | | | | AA970450, | | | | | |
| | | | | | AW055340, | | | | | |
| | | | | | AW193022, | | | | | |
| | | | | | AI288077, AI955042, | | | | | |
| | | | | | AI858187, AA978256, | | | | | |
| | | | | | AI189233, AI888974, | | | | | |
| | | | | | H01983, AA130169, | | | | | |
| | | | | | AA644170, H01972, | | | | | |
| | | | | | AI273008, AI273026, | | | | | |
| | | | | | F09244, R70971, | | | | | |
| | | | | | AW391166, | | | | | |
| | | | | | AI873591, AI399762, | | | | | |
| | | | | | AI565023, | | | | | |
| | | | | | AW189754, | | | | | |
| | | | | | AI824564, AI634443, | | | | | |
| | | | | | AI275201, AA907212, | | | | | |
| | | | | | T96248, T93742, | | | | | |
| | | | | | Z39255, AI873453, | | | | | |
| | | | | | R70923, F11589, | | | | | |
| | | | | | AA918265, AI284207, | | | | | |
| | | | | | AI567328, H91570, | | | | | |
| | | | | | AI868395, R12808, | | | | | |
| | | | | | AA354807, R59470, | | | | | |
| | | | | | AI611218, R59469, | | | | | |
| | | | | | AI636153, AA337310, | | | | | |
| | | | | | AI954448, H13229, | | | | | |
| | | | | | R32680, AI886562, | | | | | |
| | | | | | AI961717, AA255886, | | | | | |
| | | | | | AA694475, | | | | | |
| | | | | | AA854659, | | | | | |
| | | | | | AA256684, D60252, | | | | | |
| | | | | | R41517, R28489, | | | | | |
| | | | | | AI347373, AI889488, | | | | | |
| | | | | | AI309793, AI478725, | | | | | |
| | | | | | AA287318, AI691017 | | | | | |
| | | | | | AI768787, AI418367, | | | | | |
| | | | | | AI819921, H24906, | | | | | |
| | | | | | AA634601, H26324, | | | | | |
| | | | | | T24624, AI870106, | | | | | |
| | | | | | C02323, AI479533, | | | | | |
| | | | | | AI983094, AI566584, | | | | | |
| | | | | | Z43173, AA629599, | | | | | |
| | | | | | Z98172, Z84466, | | | | | |
| | | | | | and AC005225. | | | | | |
| HVVBV44 | 145 | 917559 | 1-228 | 15-242 | | | | | | |
| HVVCO01 | 146 | 913996 | 1-659 | 15-673 | | | | | | |
| HVVDT04 | 147 | 925793 | 1-286 | 15-300 | AA811233. | | | | | |
| HVVBY08 | 148 | 957658 | 1-608 | 15-622 | AA481033, AI352156, | | | | | |
| | | | | | AA845263, | | | | | |
| | | | | | AA918987, | | | | | |
| | | | | | AA534490, | | | | | |
| | | | | | AW089740, | | | | | |
| | | | | | AI718613, AA845628, | | | | | |
| | | | | | AA609823, AI369407, | | | | | |
| | | | | | AA631989, AI669939, | | | | | |
| | | | | | AI310130, | | | | | |
| | | | | | AW007165, | | | | | |
| | | | | | AA609822, AI620598, | | | | | |
| | | | | | AI310317, AI718649, | | | | | |
| | | | | | AI693036, | | | | | |
| | | | | | AI168639, AI004446, | | | | | |
| | | | | | AI253744, | | | | | |
| | | | | | AW081227, | | | | | |
| | | | | | AW005641, | | | | | |
| | | | | | AI097314, | | | | | |
| | | | | | AW235502, | | | | | |
| | | | | | AA738077, AI440490, | | | | | |
| | | | | | AA481085, AI198174, | | | | | |
| | | | | | AA121509, AI018313, | | | | | |
| | | | | | AI167316, AA601606 | | | | | |
| | | | | | AI092025, AA989671, | | | | | |
| | | | | | AA705106, | | | | | |
| | | | | | AA402875, | | | | | |
| | | | | | AA532756, | | | | | |
| | | | | | AA872342, | | | | | |
| | | | | | AW081239, | | | | | |
| | | | | | AW081228, | | | | | |
| | | | | | AA705106, | | | | | |
| | | | | | AA215299, | | | | | |
| | | | | | AA588197, | | | | | |
| | | | | | AW262214, | | | | | |
| | | | | | AA975943, | | | | | |
| | | | | | AA580166, | | | | | |
| | | | | | AW405706, | | | | | |
| | | | | | AI915786, AI762484, | | | | | |
| | | | | | AI081256, AA927941, | | | | | |
| | | | | | AI698971, AA927751, | | | | | |
| | | | | | AW009088, | | | | | |
| | | | | | AA524140, AI695474, | | | | | |
| | | | | | AI364551, AA214505, | | | | | |
| | | | | | AA722938, | | | | | |
| | | | | | AA923824, AI240069, | | | | | |
| | | | | | AA631636, AI468059, | | | | | |
| | | | | | AA358257, | | | | | |
| | | | | | AA743585, | | | | | |
| | | | | | AA382416, | | | | | |
| | | | | | AA233136, | | | | | |
| | | | | | AA729480, | | | | | |
| | | | | | AA595320, | | | | | |
| | | | | | AL119399, | | | | | |
| | | | | | AL119511, | | | | | |
| | | | | | AL119457, | | | | | |
| | | | | | AL042544, | | | | | |
| | | | | | AL119324, | | | | | |
| | | | | | AL042382, | | | | | |
| | | | | | AL043152, | | | | | |
| | | | | | AL079794, | | | | | |
| | | | | | AL043168, | | | | | |
| | | | | | AL134524, | | | | | |
| | | | | | AL037081, | | | | | |
| | | | | | AA865126, | | | | | |
| | | | | | AL042866, | | | | | |
| | | | | | AL120853, | | | | | |
| | | | | | AW051212, | | | | | |
| | | | | | AI637584, | | | | | |
| | | | | | AI433157, AI702073, | | | | | |
| | | | | | AL079741, AI591420, | | | | | |
| | | | | | AI493567, | | | | | |
| | | | | | AW051088, | | | | | |
| | | | | | AW168828, | | | | | |
| | | | | | AI590575, | | | | | |
| | | | | | AW169132, | | | | | |
| | | | | | AI673363, AI610690, | | | | | |
| | | | | | AI352497, AI698391, | | | | | |
| | | | | | AI889189, AI633125, | | | | | |
| | | | | | AI915291, | | | | | |
| | | | | | AW152182, | | | | | |
| | | | | | AI431323, AI862139, | | | | | |
| | | | | | AW078729, | | | | | |
| | | | | | AI002285, AI932794, | | | | | |
| | | | | | AW173633, | | | | | |
| | | | | | AW198090, | | | | | |
| | | | | | AW192652, | | | | | |
| | | | | | AL121007, | | | | | |
| | | | | | AI679672, | | | | | |
| | | | | | AL046052, | | | | | |
| | | | | | AI697207, AI538564, | | | | | |
| | | | | | AL046931, | | | | | |
| | | | | | AW090559, | | | | | |
| | | | | | AI560679, AI884318, | | | | | |
| | | | | | AW268964, | | | | | |
| | | | | | AI670009, | | | | | |
| | | | | | AW264019, | | | | | |
| | | | | | AW075936, | | | | | |
| | | | | | AI819326, | | | | | |
| | | | | | AW006302, | | | | | |
| | | | | | AW051258, | | | | | |
| | | | | | AI818683, | | | | | |
| | | | | | AI783792, AI612852, | | | | | |
| | | | | | AI358213, | | | | | |
| | | | | | AW129230, | | | | | |
| | | | | | AI610671, AI630877, | | | | | |
| | | | | | AI921464, | | | | | |
| | | | | | AW080746, | | | | | |
| | | | | | AI312542, AI890838, | | | | | |
| | | | | | AI040725, | | | | | |
| | | | | | AL119791, | | | | | |
| | | | | | AI473536, AA748343, | | | | | |
| | | | | | AI912356, | | | | | |
| | | | | | AW168788, | | | | | |
| | | | | | AI571439, AI802542, | | | | | |
| | | | | | AI922561, AI815855, | | | | | |
| | | | | | AI471429, AI570807, | | | | | |
| | | | | | AL037582, | | | | | |
| | | | | | AL046595, | | | | | |
| | | | | | AI866469, | | | | | |
| | | | | | AL037602, | | | | | |
| | | | | | AI288050, AI635287, | | | | | |
| | | | | | AW026882, | | | | | |
| | | | | | AW168031, | | | | | |
| | | | | | AI684234, AI559619, | | | | | |
| | | | | | AI499963, AI564719, | | | | | |
| | | | | | AI951868, A1095119, | | | | | |
| | | | | | AI669639, AI890223, | | | | | |
| | | | | | AW004886, | | | | | |
| | | | | | AI589428, | | | | | |
| | | | | | AW169604, | | | | | |
| | | | | | AI590021, AI432969, | | | | | |
| | | | | | AW078710, | | | | | |
| | | | | | AI688858, | | | | | |
| | | | | | AW239367, | | | | | |
| | | | | | AW079572, | | | | | |
| | | | | | AI270183, AI687362, | | | | | |
| | | | | | AI499285, AI653979, | | | | | |
| | | | | | AI620015, AI522052, | | | | | |
| | | | | | AI624693, AI470674, | | | | | |
| | | | | | AI677796, | | | | | |
| | | | | | AL040207, | | | | | |
| | | | | | AI619502, AI978703, | | | | | |
| | | | | | AA740450, AI923124, | | | | | |
| | | | | | AI682971, AI887396, | | | | | |
| | | | | | AW087445, | | | | | |
| | | | | | AI284084, | | | | | |
| | | | | | AW118417, | | | | | |
| | | | | | AI564259, | | | | | |
| | | | | | AW148363, | | | | | |
| | | | | | AI801766, | | | | | |
| | | | | | AW075669, | | | | | |
| | | | | | AW074172, | | | | | |
| | | | | | AW088628, | | | | | |
| | | | | | AW081298, | | | | | |
| | | | | | AI469532, AI469532, | | | | | |
| | | | | | AI872423, AI909661, | | | | | |
| | | | | | AI640729, AI283760, | | | | | |
| | | | | | AI866770, | | | | | |
| | | | | | AW190194, | | | | | |
| | | | | | AI679550, AI812015, | | | | | |
| | | | | | AI923370, W74529, | | | | | |
| | | | | | AI690748, AI613038, | | | | | |
| | | | | | AW192687, AI648684, | | | | | |
| | | | | | AI539771, AI446809, | | | | | |
| | | | | | AI870192, AI538850, | | | | | |
| | | | | | AI871697, AI580190, | | | | | |
| | | | | | AW129659, AI249877, | | | | | |
| | | | | | AI432030, | | | | | |
| | | | | | AW083778, | | | | | |
| | | | | | AI348914, AI452560, | | | | | |
| | | | | | AI926790, AA641818, | | | | | |
| | | | | | AI499890, AI890833, | | | | | |
| | | | | | AI677646, AI815232, | | | | | |
| | | | | | AWO81343, | | | | | |
| | | | | | AW193020, | | | | | |
| | | | | | AI679098, AI241923, | | | | | |
| | | | | | AI587606, | | | | | |
| | | | | | AW131294, | | | | | |
| | | | | | AW167021, | | | | | |
| | | | | | AI954183, | | | | | |
| | | | | | AW148408, | | | | | |
| | | | | | AI799183, AI357940, | | | | | |
| | | | | | AA835966, | | | | | |
| | | | | | AC005258, | | | | | |
| | | | | | AF182293, Z63483, | | | | | |
| | | | | | U77594, Y11587, | | | | | |
| | | | | | X65873, X60786, | | | | | |
| | | | | | L13297, I89947, | | | | | |
| | | | | | AL137271, | | | | | |
| | | | | | AF177401, L10353, | | | | | |
| | | | | | AF061981, AF113694, | | | | | |
| | | | | | U00763, AL080159, | | | | | |
| | | | | | X52128, A08910, | | | | | |
| | | | | | A08909, I48978, | | | | | |
| | | | | | AR038854, I30339, | | | | | |
| | | | | | I30334, AL137480, | | | | | |
| | | | | | AF111851, AF153205, | | | | | |
| | | | | | Z82022, AL137459, | | | | | |
| | | | | | AL050149, | | | | | |
| | | | | | AL050277, | | | | | |
| | | | | | AF139986, A77033, | | | | | |
| | | | | | A77033, A7035, | | | | | |
| | | | | | AL137523, A08908, | | | | | |
| | | | | | AF031147, Y09972, | | | | | |
| | | | | | I46765, A08916, | | | | | |
| | | | | | A08913, U35846, | | | | | |
| | | | | | AF067790, AF126247, | | | | | |
| | | | | | AL049347, | | | | | |
| | | | | | AF111112, | | | | | |
| | | | | | AR060234, | | | | | |
| | | | | | AF031903, | | | | | |
| | | | | | AL049430, | | | | | |
| | | | | | AF182215, | | | | | |
| | | | | | AL137281, I09499, | | | | | |
| | | | | | E05822, AL080110, | | | | | |
| | | | | | AL117583, | | | | | |
| | | | | | AF090886, | | | | | |
| | | | | | AL137533, | | | | | |
| | | | | | AL050366, S63521, | | | | | |
| | | | | | AL137478, U42766, | | | | | |
| | | | | | M92439, A18788 | | | | | |
| | | | | | AF000167, A76335, | | | | | |
| | | | | | AF183393, E06743, | | | | | |
| | | | | | AL137479, X70685, | | | | | |
| | | | | | AF151109, | | | | | |
| | | | | | AR053103, A65341, | | | | | |
| | | | | | AL133557, | | | | | |
| | | | | | AF026816, | | | | | |
| | | | | | AL137463, | | | | | |
| | | | | | AL133093, | | | | | |
| | | | | | AF001215, AF111849, | | | | | |
| | | | | | AL122100, | | | | | |
| | | | | | AF090900, | | | | | |
| | | | | | AL080148, A08912, | | | | | |
| | | | | | AL137539, X98066, | | | | | |
| | | | | | I89931, AL049283, | | | | | |
| | | | | | AJ000937, AL133075, | | | | | |
| | | | | | AL133568, | | | | | |
| | | | | | AF104032, I49625, | | | | | |
| | | | | | X82434, A18777, | | | | | |
| | | | | | AF097996, | | | | | |
| | | | | | AL117416, A45787, | | | | | |
| | | | | | AF180525, | | | | | |
| | | | | | AL133665, S77771, | | | | | |
| | | | | | I00734, AL133560, | | | | | |
| | | | | | I48979, A57389, | | | | | |
| | | | | | AL137526, Y16645, | | | | | |
| | | | | | Z37987, U66274, | | | | | |
| | | | | | E00617, E00717, | | | | | |
| | | | | | E00778, AL133113, | | | | | |
| | | | | | AR020905, | | | | | |
| | | | | | AF113019, AF113699, | | | | | |
| | | | | | AL110221, M27260, | | | | | |
| | | | | | U88966, AR066494, | | | | | |
| | | | | | AL110158, AJ003118, | | | | | |
| | | | | | AF158248, | | | | | |
| | | | | | AL110225, | | | | | |
| | | | | | AF004162, | | | | | |
| | | | | | AL137550, | | | | | |
| | | | | | AL137488, | | | | | |
| | | | | | AF114168, AF100931, | | | | | |
| | | | | | U90884, X84990, | | | | | |
| | | | | | AF017790, | | | | | |
| | | | | | AL137529, Y14314, | | | | | |
| | | | | | AL080156, | | | | | |
| | | | | | AF090901, AF030513, | | | | | |
| | | | | | AL050138, | | | | | |
| | | | | | AL137476, L04849, | | | | | |
| | | | | | AL133637, | | | | | |
| | | | | | AF067728, | | | | | |
| | | | | | AL133558, Y10936, | | | | | |
| | | | | | I33392, AF090903, | | | | | |
| | | | | | AL096744, U01145, | | | | | |
| | | | | | AL117440, | | | | | |
| | | | | | AL096751, | | | | | |
| | | | | | AL117435, | | | | | |
| | | | | | AL133565, | | | | | |
| | | | | | AF032666, Z97214, | | | | | |
| | | | | | AF081197, AF081195, | | | | | |
| | | | | | X76228, AF087943, | | | | | |
| | | | | | AF132676, AF069506, | | | | | |
| | | | | | AF061836, | | | | | |
| | | | | | AL137538, X59414, | | | | | |
| | | | | | A93350, AL080129, | | | | | |
| | | | | | AF106862, | | | | | |
| | | | | | AL110280, E01573, | | | | | |
| | | | | | E02319, I22272, | | | | | |
| | | | | | A21103, A08907, | | | | | |
| | | | | | AL133080, | | | | | |
| | | | | | AL117626, | | | | | |
| | | | | | AF079763, | | | | | |
| | | | | | AL122098, | | | | | |
| | | | | | AF185576, | | | | | |
| | | | | | AL133606, | | | | | |
| | | | | | AF000145, AF162270, | | | | | |
| | | | | | A08911, X81464, | | | | | |
| | | | | | AF028823, X80340, | | | | | |
| | | | | | E02349, AL122111, | | | | | |
| | | | | | M96857, S68736, | | | | | |
| | | | | | AL050393, U91329, | | | | | |
| | | | | | AL137267, | | | | | |
| | | | | | AL110218, | | | | | |
| | | | | | AF113691, U49434, | | | | | |
| | | | | | U67958, AF159615, | | | | | |
| | | | | | AF142672, AF017152, | | | | | |
| | | | | | U87620, X99717, | | | | | |
| | | | | | U80742, AL133031, | | | | | |
| | | | | | AJ005690, S76508, | | | | | |
| | | | | | S78214, E12747, | | | | | |
| | | | | | I89934, AL080124, | | | | | |
| | | | | | AL137429, | | | | | |
| | | | | | AF113677, X87582, | | | | | |
| | | | | | AF118090, | | | | | |
| | | | | | AL117460, | | | | | |
| | | | | | AF026124, U96683, | | | | | |
| | | | | | AL023657, AJ010277, | | | | | |
| | | | | | AL122118, | | | | | |
| | | | | | AB026128, Y08769, | | | | | |
| | | | | | A58524, A58523, | | | | | |
| | | | | | AF078844, | | | | | |
| | | | | | AL117648, | | | | | |
| | | | | | AL122110, | | | | | |
| | | | | | AL050170, | | | | | |
| | | | | | AR013797, | | | | | |
| | | | | | AF076464, AF090934, | | | | | |
| | | | | | AF114170, L19437, | | | | | |
| | | | | | U92068, X99257, | | | | | |
| | | | | | AL133640, Z72491, | | | | | |
| | | | | | L30117, AF109155, | | | | | |
| | | | | | AL117457, | | | | | |
| | | | | | AF036268, X57961, | | | | | |
| | | | | | AF057300, AF057299, | | | | | |
| | | | | | X83508, AF113690, | | | | | |
| | | | | | E03348, AFL13689, | | | | | |
| | | | | | X66862, AF022813, | | | | | |
| | | | | | AR000496, | | | | | |
| | | | | | AL137560, | | | | | |
| | | | | | AL049382, | | | | | |
| | | | | | and U39656. | | | | | |
| HVVBM06 | 149 | 933528 | 1-466 | 15-480 | AI685069, AI378607, | | | | | |
| | | | | | AI126015, AI129820, | | | | | |
| | | | | | AA912338, AI367538, | | | | | |
| | | | | | AW192295, AA495868, | | | | | |
| | | | | | and AI738723. | | | | | |
| HPDWR11 | 150 | 965249 | 1-629 | 15-643 | AI694423, AA773635, | | | | | |
| | | | | | AA443144, | | | | | |
| | | | | | AA443143, AI918138, | | | | | |
| | | | | | AW206226, | | | | | |
| | | | | | AI337165, AI350411, | | | | | |
| | | | | | N80841, W07349, | | | | | |
| | | | | | AW197541, | | | | | |
| | | | | | and AW138024. | | | | | |
| HPDWN05 | 151 | 928563 | 1-478 | 15-492 | AI627858, AI674644, | | | | | |
| | | | | | AI521975, AA653609, | | | | | |
| | | | | | AA447670, R37708, | | | | | |
| | | | | | H18650, and, | | | | | |
| | | | | | F34959. | | | | | |
| HPDVM01 | 152 | 913859 | 1-454 | 15-468 | AA905449, | | | | | |
| | | | | | AA969031, U62317, | | | | | |
| | | | | | and AC005859. | | | | | |
| HPDVD11 | 153 | 965276 | 1-293 | 15-307 | AI809869, | | | | | |
| | | | | | and AA918215. | | | | | |
| HPDRU11 | 154 | 965307 | 1-346 | 15-360 | N52071. | | | | | |
| HPDRR06 | 155 | 968601 | 1-436 | 15-450 | AA806114, | | | | | |
| | | | | | AW242125, | | | | | |
| | | | | | AI249498, AI560615, | | | | | |
| | | | | | AI274667, AI972210, | | | | | |
| | | | | | Z28533, and | | | | | |
| | | | | | AW361342. | | | | | |
| HPDRN07 | 156 | 951838 | 1-601 | 15-615 | AI3656I8, AA197089, | | | | | |
| | | | | | AW023975, | | | | | |
| | | | | | AI570067, | | | | | |
| | | | | | AW008217, H05066, | | | | | |
| | | | | | AI828721, AI620666, | | | | | |
| | | | | | H24331, AI684999, | | | | | |
| | | | | | AA205931, | | | | | |
| | | | | | AA601336, AI572680, | | | | | |
| | | | | | AI921744, AI890297, | | | | | |
| | | | | | AW338376, | | | | | |
| | | | | | AI619994, AA171400, | | | | | |
| | | | | | AI281622, AI174489, | | | | | |
| | | | | | AA218684, | | | | | |
| | | | | | AA878350, | | | | | |
| | | | | | AA523812, | | | | | |
| | | | | | AA579082, AI821342, | | | | | |
| | | | | | AA935827, | | | | | |
| | | | | | AW337817, | | | | | |
| | | | | | AI860423, | | | | | |
| | | | | | AW020102, | | | | | |
| | | | | | AW021674, | | | | | |
| | | | | | AW275432, | | | | | |
| | | | | | AI889177, AA084320, | | | | | |
| | | | | | AI798521, AA847341, | | | | | |
| | | | | | AA507499, | | | | | |
| | | | | | AA112864, AI434103, | | | | | |
| | | | | | AA610644, | | | | | |
| | | | | | AA557945, | | | | | |
| | | | | | AA584241, AI819419, | | | | | |
| | | | | | AI249365, H79277, | | | | | |
| | | | | | AI000314, AA720582, | | | | | |
| | | | | | AA493245, | | | | | |
| | | | | | AA227713, | | | | | |
| | | | | | AW157128, | | | | | |
| | | | | | AA636077, AI254267, | | | | | |
| | | | | | AI567676, AI538404, | | | | | |
| | | | | | AI862716, AA135761, | | | | | |
| | | | | | AI733523, | | | | | |
| | | | | | AW021917, | | | | | |
| | | | | | AA584489, AI969090, | | | | | |
| | | | | | AI872229, AI813920, | | | | | |
| | | | | | AW129188, | | | | | |
| | | | | | AA629668, | | | | | |
| | | | | | AL044966, | | | | | |
| | | | | | AI038029, R64110, | | | | | |
| | | | | | AI755214, AI754567, | | | | | |
| | | | | | AI925588, R79396, | | | | | |
| | | | | | AI114755, AA669238, | | | | | |
| | | | | | AI734076, AA809546, | | | | | |
| | | | | | AA733089, N99245, | | | | | |
| | | | | | AI174827, W44797, | | | | | |
| | | | | | AI857834, H47461, | | | | | |
| | | | | | AI609992, N27340, | | | | | |
| | | | | | AA618531, | | | | | |
| | | | | | AA814719, | | | | | |
| | | | | | AW149241, | | | | | |
| | | | | | AW340905, | | | | | |
| | | | | | AA826109, | | | | | |
| | | | | | AA779599, | | | | | |
| | | | | | AA598608, | | | | | |
| | | | | | AA554289, | | | | | |
| | | | | | AW028376, | | | | | |
| | | | | | AA550989, AI148840, | | | | | |
| | | | | | AW192930, | | | | | |
| | | | | | AW069769, | | | | | |
| | | | | | AI754105, C75332, | | | | | |
| | | | | | AI439525, AI307563, | | | | | |
| | | | | | AI307563, AI049845, | | | | | |
| | | | | | AA280886, | | | | | |
| | | | | | AL135490, | | | | | |
| | | | | | AA112646, | | | | | |
| | | | | | AW023111, | | | | | |
| | | | | | AI201983, AA225141, | | | | | |
| | | | | | AW277240, | | | | | |
| | | | | | AW439224, | | | | | |
| | | | | | AI123488, | | | | | |
| | | | | | AW021847, N49298, | | | | | |
| | | | | | AA525156, | | | | | |
| | | | | | AW085626, | | | | | |
| | | | | | AW162762, | | | | | |
| | | | | | AA570255, | | | | | |
| | | | | | AA834891, W69639, | | | | | |
| | | | | | AA522864, AI803824, | | | | | |
| | | | | | AA129000, AI003391, | | | | | |
| | | | | | AA364147, AI282479, | | | | | |
| | | | | | AI754926, AA573564, | | | | | |
| | | | | | AL044701, | | | | | |
| | | | | | AW189853, | | | | | |
| | | | | | AA657808, | | | | | |
| | | | | | AA182928, H54601, | | | | | |
| | | | | | AA167656, M77888, | | | | | |
| | | | | | T50676, F35684, | | | | | |
| | | | | | AA702637, | | | | | |
| | | | | | AA969564, W02419, | | | | | |
| | | | | | AA342029, | | | | | |
| | | | | | AW237905, | | | | | |
| | | | | | AI791659, R61887, | | | | | |
| | | | | | AA086042, AI732690, | | | | | |
| | | | | | AI890857, AI732327, | | | | | |
| | | | | | AA635150, AI815210, | | | | | |
| | | | | | AI926876, N66744, | | | | | |
| | | | | | AI459879, AI370470, | | | | | |
| | | | | | AW083966, | | | | | |
| | | | | | AI754257, AI932871, | | | | | |
| | | | | | AA492496, R67038, | | | | | |
| | | | | | AI587213, AA488419, | | | | | |
| | | | | | AA714011, H59856, | | | | | |
| | | | | | AI734075, AA772493, | | | | | |
| | | | | | AA904211, | | | | | |
| | | | | | AA633804, | | | | | |
| | | | | | AW243817, | | | | | |
| | | | | | AW070901, | | | | | |
| | | | | | AI934664, | | | | | |
| | | | | | AW419227, | | | | | |
| | | | | | AA862312, | | | | | |
| | | | | | AI446574, AI249688, | | | | | |
| | | | | | AI921765, | | | | | |
| | | | | | AW085811, | | | | | |
| | | | | | AA100107, F23221, | | | | | |
| | | | | | AA503298, | | | | | |
| | | | | | AA640305, AI523356, | | | | | |
| | | | | | AA470490, | | | | | |
| | | | | | AA828840, | | | | | |
| | | | | | AA653291, | | | | | |
| | | | | | AA483606, | | | | | |
| | | | | | AI537020, AC004263, | | | | | |
| | | | | | AC006947, | | | | | |
| | | | | | AP000359, | | | | | |
| | | | | | AC005327, Z83844, | | | | | |
| | | | | | AC007686, | | | | | |
| | | | | | AC007055, | | | | | |
| | | | | | AC006530, | | | | | |
| | | | | | AC005015, | | | | | |
| | | | | | AL049553, | | | | | |
| | | | | | AF207955, | | | | | |
| | | | | | AC006441, | | | | | |
| | | | | | AL049780, | | | | | |
| | | | | | AC004228, | | | | | |
| | | | | | AC007540, | | | | | |
| | | | | | AL035417, Y10196, | | | | | |
| | | | | | AC001228, | | | | | |
| | | | | | AP000510, | | | | | |
| | | | | | AC005043, | | | | | |
| | | | | | AL049709, | | | | | |
| | | | | | AL034423, | | | | | |
| | | | | | AC007030, | | | | | |
| | | | | | AF195658, | | | | | |
| | | | | | AC005081, Z97196, | | | | | |
| | | | | | AL139054, | | | | | |
| | | | | | AC007066, | | | | | |
| | | | | | AC005519, Z99716, | | | | | |
| | | | | | AL031587, | | | | | |
| | | | | | AL136295, | | | | | |
| | | | | | AC007308, | | | | | |
| | | | | | AC006039, | | | | | |
| | | | | | AC005529, | | | | | |
| | | | | | AC007695, | | | | | |
| | | | | | AL133246, | | | | | |
| | | | | | AL020998, | | | | | |
| | | | | | AC005412, | | | | | |
| | | | | | AF111169, Z98044, | | | | | |
| | | | | | AL049569, | | | | | |
| | | | | | AC004999, | | | | | |
| | | | | | AC005702, | | | | | |
| | | | | | AC006241, | | | | | |
| | | | | | AC004882, | | | | | |
| | | | | | AL031291, | | | | | |
| | | | | | AL031651, | | | | | |
| | | | | | AL121657, | | | | | |
| | | | | | AL021937, | | | | | |
| | | | | | AC006312, | | | | | |
| | | | | | AC004938, Z85987, | | | | | |
| | | | | | AC004707, | | | | | |
| | | | | | AC005180, Z82184, | | | | | |
| | | | | | AL022165, | | | | | |
| | | | | | AC004150, | | | | | |
| | | | | | AC002352, | | | | | |
| | | | | | AC004770, | | | | | |
| | | | | | AC002470, | | | | | |
| | | | | | AC004963, Z93241, | | | | | |
| | | | | | AC004851, Z70289, | | | | | |
| | | | | | AL031055, | | | | | |
| | | | | | AC002310, | | | | | |
| | | | | | AC005668, | | | | | |
| | | | | | AC010200, | | | | | |
| | | | | | AL035588, | | | | | |
| | | | | | AC004974, | | | | | |
| | | | | | AC004841, | | | | | |
| | | | | | AL049776, | | | | | |
| | | | | | AC006449, | | | | | |
| | | | | | AC005280, U91321, | | | | | |
| | | | | | AF001549, | | | | | |
| | | | | | AC004477, | | | | | |
| | | | | | AC002115, U91318, | | | | | |
| | | | | | AL022312, Z99774, | | | | | |
| | | | | | AC003025, | | | | | |
| | | | | | AL034548, | | | | | |
| | | | | | AC004973, | | | | | |
| | | | | | AC005684, | | | | | |
| | | | | | AC007227, | | | | | |
| | | | | | Z93017, AC007151, | | | | | |
| | | | | | AC004811, U91326, | | | | | |
| | | | | | AC004605, | | | | | |
| | | | | | AC005031, | | | | | |
| | | | | | AC012384, | | | | | |
| | | | | | AL031985, | | | | | |
| | | | | | AF095725, | | | | | |
| | | | | | AC000065, | | | | | |
| | | | | | AF139813, | | | | | |
| | | | | | AC006055, | | | | | |
| | | | | | AL022314, | | | | | |
| | | | | | AL031005, | | | | | |
| | | | | | AC007207, U80017, | | | | | |
| | | | | | Z98051, AL022330, | | | | | |
| | | | | | AC005815, | | | | | |
| | | | | | AC005005, | | | | | |
| | | | | | AF207550, | | | | | |
| | | | | | AC002347, | | | | | |
| | | | | | AC004787, | | | | | |
| | | | | | AL031284, | | | | | |
| | | | | | AL035458, | | | | | |
| | | | | | AC000025, | | | | | |
| | | | | | AC006561, | | | | | |
| | | | | | AC002544, | | | | | |
| | | | | | AL022097, | | | | | |
| | | | | | AC004797, | | | | | |
| | | | | | AF196779, | | | | | |
| | | | | | AC005377, | | | | | |
| | | | | | AL117694, | | | | | |
| | | | | | AL009181, | | | | | |
| | | | | | AL121754, | | | | | |
| | | | | | AL086712, M88651, | | | | | |
| | | | | | AC005932, ZA8051, | | | | | |
| | | | | | AF047825, | | | | | |
| | | | | | AC005838, | | | | | |
| | | | | | AC007773, | | | | | |
| | | | | | AC004032, | | | | | |
| | | | | | AC005874, | | | | | |
| | | | | | AF134471, Z98949, | | | | | |
| | | | | | AP000591, | | | | | |
| | | | | | AC005320, | | | | | |
| | | | | | AL031664, | | | | | |
| | | | | | AL035071, | | | | | |
| | | | | | AB023049, Y18000, | | | | | |
| | | | | | AC004832, | | | | | |
| | | | | | AC007955, | | | | | |
| | | | | | AC007917, | | | | | |
| | | | | | AB023060, | | | | | |
| | | | | | AC006581, U95739, | | | | | |
| | | | | | AL035089, | | | | | |
| | | | | | AC004169, | | | | | |
| | | | | | AL031667, | | | | | |
| | | | | | AC004825, | | | | | |
| | | | | | AC004531, Z95115, | | | | | |
| | | | | | AL034420, | | | | | |
| | | | | | AC006511, | | | | | |
| | | | | | AL031295, | | | | | |
| | | | | | AC006560, | | | | | |
| | | | | | AL031053, | | | | | |
| | | | | | AF111167, | | | | | |
| | | | | | AC005696, | | | | | |
| | | | | | AC005220, | | | | | |
| | | | | | AC005375, | | | | | |
| | | | | | AC002059, | | | | | |
| | | | | | AC006057, | | | | | |
| | | | | | AL035422, | | | | | |
| | | | | | AC003101, | | | | | |
| | | | | | AL080312, | | | | | |
| | | | | | AL109839, | | | | | |
| | | | | | AC007225, | | | | | |
| | | | | | AL049829, | | | | | |
| | | | | | AL109984, | | | | | |
| | | | | | AC004820, | | | | | |
| | | | | | AP000558, | | | | | |
| | | | | | AC005520, | | | | | |
| | | | | | AL080243, | | | | | |
| | | | | | AL008718, | | | | | |
| | | | | | AC003104, | | | | | |
| | | | | | AC004686, | | | | | |
| | | | | | AL109627, | | | | | |
| | | | | | AL133546, | | | | | |
| | | | | | AL031666, Z95118, | | | | | |
| | | | | | AL049872, | | | | | |
| | | | | | AC006162, AJ251973, | | | | | |
| | | | | | U78027, AC004230, | | | | | |
| | | | | | AC004887, | | | | | |
| | | | | | AC002400, | | | | | |
| | | | | | AC007011, | | | | | |
| | | | | | AC006229, | | | | | |
| | | | | | AC006450, | | | | | |
| | | | | | AC004883, | | | | | |
| | | | | | AC002375, | | | | | |
| | | | | | AC004000, | | | | | |
| | | | | | AF196971, | | | | | |
| | | | | | AC005871, | | | | | |
| | | | | | AE000658, | | | | | |
| | | | | | AC002316, | | | | | |
| | | | | | AC002369, Z97055, | | | | | |
| | | | | | AC007016, | | | | | |
| | | | | | AC006942, | | | | | |
| | | | | | AP000555, | | | | | |
| | | | | | AC004417, | | | | | |
| | | | | | AL035461, | | | | | |
| | | | | | AC004216, | | | | | |
| | | | | | AL135960, AJ131016, | | | | | |
| | | | | | AC007041, | | | | | |
| | | | | | AL034554, | | | | | |
| | | | | | AC003043, | | | | | |
| | | | | | AC009516, | | | | | |
| | | | | | AL121653, | | | | | |
| | | | | | AL035681, | | | | | |
| | | | | | AC005058, | | | | | |
| | | | | | AL030996, Z82215, | | | | | |
| | | | | | AC005261, | | | | | |
| | | | | | AL031281, | | | | | |
| | | | | | AB026898, | | | | | |
| | | | | | AC005908, | | | | | |
| | | | | | AP000114, AP000046, | | | | | |
| | | | | | AL022326, | | | | | |
| | | | | | AL021939, | | | | | |
| | | | | | AL133445, | | | | | |
| | | | | | AD000092, Z85996, | | | | | |
| | | | | | AL033524, | | | | | |
| | | | | | AC003006, | | | | | |
| | | | | | AC000105, | | | | | |
| | | | | | AC005539, | | | | | |
| | | | | | AL020997, | | | | | |
| | | | | | AC003969, | | | | | |
| | | | | | AL078621, | | | | | |
| | | | | | AC010209, | | | | | |
| | | | | | AC006236, | | | | | |
| | | | | | AL078581, | | | | | |
| | | | | | AC005562, | | | | | |
| | | | | | AC008372, | | | | | |
| | | | | | AC005899, | | | | | |
| | | | | | AL096701, | | | | | |
| | | | | | AC004834, | | | | | |
| | | | | | AC004687, | | | | | |
| | | | | | AL035086, | | | | | |
| | | | | | AC004638, | | | | | |
| | | | | | AC004881, | | | | | |
| | | | | | AP000036, | | | | | |
| | | | | | and AL133355. | | | | | |
| HPDRG01 | 157 | 914416 | 1-757 | 15-771 | AW182845, R06052, | | | | | |
| | | | | | AI342212, R05947, | | | | | |
| | | | | | and Z61625. | | | | | |
| HPDPS12 | 158 | 969342 | 1-448 | 15-462 | AA703816, AA258655, | | | | | |
| | | | | | and AW173253. | | | | | |
| HPDPP12 | 159 | 969341 | 1-466 | 15-480 | AA491958. | | | | | |
| HPDPC08 | 160 | 957822 | 1-443 | 15-457 | AL043010. | | | | | |
| HPDOW10 | 161 | 961782 | 1-430 | 15-444 | AI301598, AA889756, | | | | | |
| | | | | | AA279491, AI301605, | | | | | |
| | | | | | AA721450, and | | | | | |
| | | | | | AL020997. | | | | | |
| HPDOO10 | 162 | 961881 | 1-754 | 15-768 | AI939627, AI199438, | | | | | |
| | | | | | AI498865, Z99396, | | | | | |
| | | | | | AW392670, | | | | | |
| | | | | | AL036418, | | | | | |
| | | | | | AL038837, | | | | | |
| | | | | | AL037051, | | | | | |
| | | | | | AL036725, | | | | | |
| | | | | | AW384394, | | | | | |
| | | | | | AL036858, | | | | | |
| | | | | | AA631969, | | | | | |
| | | | | | AW372827, | | | | | |
| | | | | | AL119443, | | | | | |
| | | | | | AW363220, | | | | | |
| | | | | | AL119497, | | | | | |
| | | | | | AL119483, | | | | | |
| | | | | | AL039074, | | | | | |
| | | | | | AL119319, | | | | | |
| | | | | | AL119355, | | | | | |
| | | | | | AL119457, | | | | | |
| | | | | | AL119324, | | | | | |
| | | | | | AL036924, U46349, | | | | | |
| | | | | | AL119484, | | | | | |
| | | | | | AL119363, | | | | | |
| | | | | | AL119391, U46350, | | | | | |
| | | | | | AL119522, U46341, | | | | | |
| | | | | | U46351, AL119341, | | | | | |
| | | | | | AL038509, | | | | | |
| | | | | | AL119418, | | | | | |
| | | | | | AL119335, | | | | | |
| | | | | | AL039564, | | | | | |
| | | | | | AL119396, | | | | | |
| | | | | | AL039085, | | | | | |
| | | | | | AL039156, | | | | | |
| | | | | | AL039108, | | | | | |
| | | | | | AL039109, | | | | | |
| | | | | | AL039128, | | | | | |
| | | | | | AL119496, U46347, | | | | | |
| | | | | | AL037639, | | | | | |
| | | | | | AL119444, | | | | | |
| | | | | | AL134531, | | | | | |
| | | | | | AL037094, | | | | | |
| | | | | | AL039659, | | | | | |
| | | | | | AL036196, | | | | | |
| | | | | | AL036190, | | | | | |
| | | | | | AL037205, | | | | | |
| | | | | | AI142137, AL119439, | | | | | |
| | | | | | U46346, AL042984, | | | | | |
| | | | | | AL037526, | | | | | |
| | | | | | AL134538, | | | | | |
| | | | | | AL037085, | | | | | |
| | | | | | AL038531, | | | | | |
| | | | | | AL042614, | | | | | |
| | | | | | AL036767, | | | | | |
| | | | | | AL043029, | | | | | |
| | | | | | AL037082, | | | | | |
| | | | | | AL037077, | | | | | |
| | | | | | AL036268, | | | | | |
| | | | | | AL119399, | | | | | |
| | | | | | AL042965, | | | | | |
| | | | | | AL042975, | | | | | |
| | | | | | AL134527, U46345, | | | | | |
| | | | | | AL039625, | | | | | |
| | | | | | AL039648, | | | | | |
| | | | | | AL045337, | | | | | |
| | | | | | AL038520, | | | | | |
| | | | | | AL119488, | | | | | |
| | | | | | AL042542, | | | | | |
| | | | | | AL036238, | | | | | |
| | | | | | AL038851, | | | | | |
| | | | | | AL043019, | | | | | |
| | | | | | AL042551, | | | | | |
| | | | | | AL043033, | | | | | |
| | | | | | AL038447, | | | | | |
| | | | | | AL043011, | | | | | |
| | | | | | AL042544, | | | | | |
| | | | | | AL039678, | | | | | |
| | | | | | AL039629, | | | | | |
| | | | | | AL042450, | | | | | |
| | | | | | AL039386, | | | | | |
| | | | | | AL037615, | | | | | |
| | | | | | AL043003, | | | | | |
| | | | | | AL119464, | | | | | |
| | | | | | AL036733, | | | | | |
| | | | | | AL037027, | | | | | |
| | | | | | AL037178, | | | | | |
| | | | | | AL036774, | | | | | |
| | | | | | AL036719, | | | | | |
| | | | | | AL036998, | | | | | |
| | | | | | AL039410, | | | | | |
| | | | | | AL036679, | | | | | |
| | | | | | AL036886, | | | | | |
| | | | | | AL036765, | | | | | |
| | | | | | AL036191, | | | | | |
| | | | | | AL036158, | | | | | |
| | | | | | AR060234, | | | | | |
| | | | | | AR066494, A81671, | | | | | |
| | | | | | AR023813, | | | | | |
| | | | | | AR064707, | | | | | |
| | | | | | AR069079, | | | | | |
| | | | | | AB026436, | | | | | |
| | | | | | and AR054110. | | | | | |
| HPDOF11 | 163 | 965491 | 1-870 | 15-884 | AI939537, AI363373, | | | | | |
| | | | | | and AL021997. | | | | | |
| HPCTK02 | 164 | 917480 | 1-434 | 15-448 | N24908, AI916992, | | | | | |
| | | | | | and N49979. | | | | | |
| HPCTD03 | 165 | 922149 | 1-361 | 15-375 | AF150341, AI767747, | | | | | |
| | | | | | AI972527, N85789, | | | | | |
| | | | | | AI637774, AC001555, | | | | | |
| | | | | | L81893, AC006077, | | | | | |
| | | | | | and L81892. | | | | | |
| HPCTC04 | 166 | 925777 | 1-485 | 15-499 | AI635931, | | | | | |
| | | | | | AW241388, | | | | | |
| | | | | | AI360647, AI218091, | | | | | |
| | | | | | AI868064, AI824561, | | | | | |
| | | | | | AC006198, | | | | | |
| | | | | | and AL079338. | | | | | |
| HPCQQ07 | 167 | 951646 | 1-399 | 15-413 | AI350228, AI792022, | | | | | |
| | | | | | R20916, AI701465, | | | | | |
| | | | | | AI457852, AI261722, | | | | | |
| | | | | | AI741246, AF017104, | | | | | |
| | | | | | and AC016831. | | | | | |
| HPCPM63 | 168 | 954940 | 1-483 | 15-497 | AI131455, | | | | | |
| | | | | | and AI761541. | | | | | |
| HPCOV68 | 169 | 911075 | 1-578 | 15-592 | AA604716, R49364, | | | | | |
| | | | | | and AC004500. | | | | | |
| HOPJG10 | 170 | 961501 | 1-390 | 15-404 | AA227778, | | | | | |
| | | | | | AW451197, | | | | | |
| | | | | | T16264, AI341388, | | | | | |
| | | | | | AI968604, AA663092, | | | | | |
| | | | | | X00671, Z96349, | | | | | |
| | | | | | V00144, and K01786. | | | | | |
| HOOKF10 | 171 | 961499 | 1-479 | 15-493 | AI292005. | | | | | |
| HOOKF04 | 172 | 925784 | 1-577 | 15-591 | AI807982, AI240099, | | | | | |
| | | | | | AA868661, | | | | | |
| | | | | | AA625993, | | | | | |
| | | | | | AW269043, | | | | | |
| | | | | | AI221135, AI024201, | | | | | |
| | | | | | N33757, AI799092, | | | | | |
| | | | | | and AF092091. | | | | | |
| HOOJU04 | 173 | 925774 | 1-345 | 15-359 | AI432402, AI276478, | | | | | |
| | | | | | AI675712, and | | | | | |
| | | | | | AF092091. | | | | | |
| HOOJN04 | 174 | 925783 | 1-541 | 15-555 | AI206132, AI760658, | | | | | |
| | | | | | AW207202, | | | | | |
| | | | | | AI361331, AI309566, | | | | | |
| | | | | | AL119748, AI436462, | | | | | |
| | | | | | AL049085, F37471, | | | | | |
| | | | | | AL042628, | | | | | |
| | | | | | AL040243, | | | | | |
| | | | | | AL035684, | | | | | |
| | | | | | AB014511, | | | | | |
| | | | | | AF152243, | | | | | |
| | | | | | AL122049, | | | | | |
| | | | | | and AC000403. | | | | | |
| HOOJK11 | 175 | 965292 | 1-472 | 15-486 | AI333634, | | | | | |
| | | | | | and H78014. | | | | | |
| HOOJH05 | 176 | 928627 | 1-238 | 15-252 | AI223084, AA411815, | | | | | |
| | | | | | and AA403084. | | | | | |
| HOOJE02 | 177 | 917454 | 1-372 | 15-386 | AI192015. | | | | | |
| HOGIL05 | 178 | 928644 | 1-430 | 15-444 | AA470830, AI859849, | | | | | |
| | | | | | AI766193, | | | | | |
| | | | | | AW439625, | | | | | |
| | | | | | AW439820, | | | | | |
| | | | | | AI962973, AA464728, | | | | | |
| | | | | | AI888957, AA463944, | | | | | |
| | | | | | AA235454, AI933818, | | | | | |
| | | | | | AA468183, | | | | | |
| | | | | | AA844370, | | | | | |
| | | | | | and AI127133. | | | | | |
| HOOIG03 | 179 | 922510 | 1-423 | 15-437 | AA088667. | | | | | |
| HOOHP02 | 180 | 917424 | 1-415 | 15-429 | AW024908, | | | | | |
| | | | | | AA678379, | | | | | |
| | | | | | AA477631, N54347, | | | | | |
| | | | | | and R26531. | | | | | |
| HOOHE67 | 181 | 969061 | 1-795 | 15-809 | N95228, AW016802, | | | | | |
| | | | | | AI375092, AI985579, | | | | | |
| | | | | | AI188610, AI656562, | | | | | |
| | | | | | AI972873, AI991588, | | | | | |
| | | | | | AW055145, | | | | | |
| | | | | | AI936408, AI292190, | | | | | |
| | | | | | AI094172, | | | | | |
| | | | | | AW182193, | | | | | |
| | | | | | AI191047, AI078514, | | | | | |
| | | | | | AI763004, AI830734, | | | | | |
| | | | | | R38989, R49050, | | | | | |
| | | | | | AA046092, H49273, | | | | | |
| | | | | | AI202609, R99234, | | | | | |
| | | | | | AI262420, A19327, | | | | | |
| | | | | | A19327, AL037112, | | | | | |
| | | | | | W87481, AA581541, | | | | | |
| | | | | | N94137, AI221613, | | | | | |
| | | | | | AA404487, W69271, | | | | | |
| | | | | | AI521710, Z38912, | | | | | |
| | | | | | R05523, H12506, | | | | | |
| | | | | | AI468774, AA046135, | | | | | |
| | | | | | AI984653, | | | | | |
| | | | | | AW236116, | | | | | |
| | | | | | AA099158, | | | | | |
| | | | | | AA019723, AI554117, | | | | | |
| | | | | | AI090954, | | | | | |
| | | | | | AW007126, N70968, | | | | | |
| | | | | | AL035700, | | | | | |
| | | | | | AC007270, | | | | | |
| | | | | | and AF131754. | | | | | |
| HOOHD06 | 182 | 933873 | 1-235 | 15-249 | AI560165, AI955723, | | | | | |
| | | | | | AW138740, | | | | | |
| | | | | | and AL133011. | | | | | |
| HODKG07 | 183 | 951875 | 1-662 | 15-676 | AA653929, F20611, | | | | | |
| | | | | | and F20581. | | | | | |
| HODJU05 | 184 | 929321 | 1-471 | 15-485 | AL135682, | | | | | |
| | | | | | AA446265, T26578, | | | | | |
| | | | | | H06982, C14389, | | | | | |
| | | | | | C14331, D80195, | | | | | |
| | | | | | D59502, D59619, | | | | | |
| | | | | | D80210, D80240, | | | | | |
| | | | | | C15076, D80164, | | | | | |
| | | | | | D80212, D80022, | | | | | |
| | | | | | D80166, D80219, | | | | | |
| | | | | | D80193, D81030, | | | | | |
| | | | | | C14429, D59467, | | | | | |
| | | | | | D59467, D59275, | | | | | |
| | | | | | D80227, D81026, | | | | | |
| | | | | | D58283, D59859, | | | | | |
| | | | | | D80391, D59787, | | | | | |
| | | | | | D51423, D51799, | | | | | |
| | | | | | D80253, D80045, | | | | | |
| | | | | | D80043, AA305578, | | | | | |
| | | | | | D80269, D80038, | | | | | |
| | | | | | D80196, D50979, | | | | | |
| | | | | | D80188, D59889, | | | | | |
| | | | | | D59927, AA305409, | | | | | |
| | | | | | D80248, D57483, | | | | | |
| | | | | | D59610, D80378, | | | | | |
| | | | | | D80366, D51022, | | | | | |
| | | | | | D50995, D80024, | | | | | |
| | | | | | AA514188, | | | | | |
| | | | | | AW177440, | | | | | |
| | | | | | AW360811, D80241, | | | | | |
| | | | | | D51060, AW178893, | | | | | |
| | | | | | D80133, D80522, | | | | | |
| | | | | | D80251, D80132, | | | | | |
| | | | | | AA514186, T03269, | | | | | |
| | | | | | AW179328, C14014, | | | | | |
| | | | | | C75259, D80302, | | | | | |
| | | | | | AW377676, | | | | | |
| | | | | | AW378532, | | | | | |
| | | | | | AW375405, C05695, | | | | | |
| | | | | | AW177501, | | | | | |
| | | | | | AW177511, | | | | | |
| | | | | | AW377671, D80268, | | | | | |
| | | | | | AW178762, D80134, | | | | | |
| | | | | | AW366296, D80439, | | | | | |
| | | | | | AW360844, D51250, | | | | | |
| | | | | | AW360817, | | | | | |
| | | | | | AW375406, D58253, | | | | | |
| | | | | | D80064, AW378534, | | | | | |
| | | | | | AW378534, | | | | | |
| | | | | | AW179332, | | | | | |
| | | | | | AW377672, | | | | | |
| | | | | | AW179023, | | | | | |
| | | | | | AW178905, | | | | | |
| | | | | | AW178775, | | | | | |
| | | | | | AW369651, D80168, | | | | | |
| | | | | | F13647, D59373, | | | | | |
| | | | | | AW352158, D59695, | | | | | |
| | | | | | D80949, AW352117, | | | | | |
| | | | | | AI910186, | | | | | |
| | | | | | AW352171, | | | | | |
| | | | | | AW176467, C14407, | | | | | |
| | | | | | AW178906, | | | | | |
| | | | | | AW352170, | | | | | |
| | | | | | AW177731, D80247, | | | | | |
| | | | | | AW178907, D52291, | | | | | |
| | | | | | AW179019, | | | | | |
| | | | | | AW179024, | | | | | |
| | | | | | AW177505, C14298, | | | | | |
| | | | | | AW179020, | | | | | |
| | | | | | AW360841, | | | | | |
| | | | | | AW178909, | | | | | |
| | | | | | AW177456, | | | | | |
| | | | | | AW352174, | | | | | |
| | | | | | AW179329, | | | | | |
| | | | | | AW178980, | | | | | |
| | | | | | AW177733, | | | | | |
| | | | | | AW378528, | | | | | |
| | | | | | AW178908, | | | | | |
| | | | | | AW178754, | | | | | |
| | | | | | AW179018, C14227, | | | | | |
| | | | | | D80157, T11417, | | | | | |
| | | | | | D81111, D51103, | | | | | |
| | | | | | AW179004, | | | | | |
| | | | | | AW179012, | | | | | |
| | | | | | AI905856, | | | | | |
| | | | | | AW178914, | | | | | |
| | | | | | AW378525, | | | | | |
| | | | | | AW367967, D59503, | | | | | |
| | | | | | AW177722, | | | | | |
| | | | | | AW177728, D51759, | | | | | |
| | | | | | AW179099, | | | | | |
| | | | | | AW360834, | | | | | |
| | | | | | AW178774, | | | | | |
| | | | | | AW178911, | | | | | |
| | | | | | AW378543, | | | | | |
| | | | | | AW352163, D58246, | | | | | |
| | | | | | C06015, AW378540, | | | | | |
| | | | | | C14077, Z21582, | | | | | |
| | | | | | D59627, D80258, | | | | | |
| | | | | | AW178983, D59653, | | | | | |
| | | | | | AW178781, T48593, | | | | | |
| | | | | | D58101, C03092, | | | | | |
| | | | | | AW352120, | | | | | |
| | | | | | AW177723, | | | | | |
| | | | | | AA285331, | | | | | |
| | | | | | D51213, AI535850, | | | | | |
| | | | | | D51097, D45260, | | | | | |
| | | | | | C14975, AW378533, | | | | | |
| | | | | | C14344, D80014, | | | | | |
| | | | | | AA809122, | | | | | |
| | | | | | AW367950, | | | | | |
| | | | | | AI557751, AI525923, | | | | | |
| | | | | | H67854, H67866, | | | | | |
| | | | | | AW177508, | | | | | |
| | | | | | T03116, AW178986, | | | | | |
| | | | | | D45273, AW177497, | | | | | |
| | | | | | D80228, D59317, | | | | | |
| | | | | | AI535686, | | | | | |
| | | | | | AW177734, | | | | | |
| | | | | | AI525917, D59551, | | | | | |
| | | | | | C14973, D51221, | | | | | |
| | | | | | AI557774, D59474, | | | | | |
| | | | | | AI525920, D60010, | | | | | |
| | | | | | AA514184, D60214, | | | | | |
| | | | | | AI525227, C13958, | | | | | |
| | | | | | T02974, T03048, | | | | | |
| | | | | | C14957, C14046, | | | | | |
| | | | | | AI525242, AI525235, | | | | | |
| | | | | | D51053, AI525912, | | | | | |
| | | | | | AW378542, F13796, | | | | | |
| | | | | | AI525215, | | | | | |
| | | | | | AW378539, C16955, | | | | | |
| | | | | | C05763, AI535961, | | | | | |
| | | | | | Z33452, AI525237, | | | | | |
| | | | | | AI525222, AC007686, | | | | | |
| | | | | | A84916, AJ132110, | | | | | |
| | | | | | A62300, A62298, | | | | | |
| | | | | | AR018138, | | | | | |
| | | | | | AF058696, | | | | | |
| | | | | | AR008278, | | | | | |
| | | | | | AB028859, X67155, | | | | | |
| | | | | | Y17188, D26022, | | | | | |
| | | | | | A25909, A67220, | | | | | |
| | | | | | D89785, A78862, | | | | | |
| | | | | | D34614, Y12724, | | | | | |
| | | | | | I82448, D88547, | | | | | |
| | | | | | A82595, X82626, | | | | | |
| | | | | | AR060385, | | | | | |
| | | | | | AB002449, A94995, | | | | | |
| | | | | | AR016808, | | | | | |
| | | | | | AR025207, | | | | | |
| | | | | | AR008443, I50126, | | | | | |
| | | | | | I50132, I50128, | | | | | |
| | | | | | I50133, AR066488, | | | | | |
| | | | | | AR016514, A45456, | | | | | |
| | | | | | AR060138, I14842, | | | | | |
| | | | | | A26615, AR052274, | | | | | |
| | | | | | AB012117, | | | | | |
| | | | | | AR066490, Y09669, | | | | | |
| | | | | | A43192, A43190, | | | | | |
| | | | | | AR038669, | | | | | |
| | | | | | AR066487, I18367, | | | | | |
| | | | | | A30438, X68127, | | | | | |
| | | | | | AR054175, D50010, | | | | | |
| | | | | | Y17187, A85396, | | | | | |
| | | | | | D88507, AR066482, | | | | | |
| | | | | | A44171, A63261, | | | | | |
| | | | | | A85477, I19525, | | | | | |
| | | | | | A86792, AR008277, | | | | | |
| | | | | | AR008281, X93549, | | | | | |
| | | | | | AR008408, | | | | | |
| | | | | | AR062872, A70867, | | | | | |
| | | | | | AR016691, | | | | | |
| | | | | | AR016690, U46128, | | | | | |
| | | | | | D13509, I79511, | | | | | |
| | | | | | A64136, A68321, | | | | | |
| | | | | | AR060133, U79457, | | | | | |
| | | | | | AF123263, | | | | | |
| | | | | | AR032065, X72378, | | | | | |
| | | | | | and AR008382. | | | | | |
| HODJL04 | 185 | 926200 | 1-314 | 15-328 | AA649610, | | | | | |
| | | | | | AA761836, | | | | | |
| | | | | | and Z97195. | | | | | |
| HODHK07 | 186 | 952193 | 1-521 | 15-535 | H03808. | | | | | |
| HODHG11 | 187 | 966063 | 1-704 | 15-718 | AI208573. | | | | | |
| HODGL88 | 188 | 859300 | 1-655 | 15-669 | W78906, N87704, | | | | | |
| | | | | | R01599, | | | | | |
| | | | | | and AF131819. | | | | | |
| HODGJ02 | 189 | 918476 | 1-466 | 15-480 | N77172, AA247874, | | | | | |
| | | | | | and AC004492. | | | | | |
| HODFY10 | 190 | 963350 | 1-461 | 15-475 | AA426476, | | | | | |
| | | | | | and AA424622. | | | | | |
| HODFX19 | 191 | 842138 | 1-733 | 15-747 | AI376921, AA975777, | | | | | |
| | | | | | AI001802, AI986107, | | | | | |
| | | | | | AI277187, AA024836, | | | | | |
| | | | | | AA814148, | | | | | |
| | | | | | AA946575, AI823500, | | | | | |
| | | | | | AI934527, R01773, | | | | | |
| | | | | | AA069448, AI214374, | | | | | |
| | | | | | AI261766, AI740547, | | | | | |
| | | | | | AI149941, R67552, | | | | | |
| | | | | | AI761204, H22357, | | | | | |
| | | | | | AA991800, AI394623, | | | | | |
| | | | | | AI090982, T50900, | | | | | |
| | | | | | AA634859, AA931388, | | | | | |
| | | | | | and AF055496. | | | | | |
| HODFX12 | 192 | 969588 | 1-320 | 15-334 | AI936005. | | | | | |
| HODFX04 | 193 | 926278 | 1-479 | 15-493 | AA976439, | | | | | |
| | | | | | and N77643. | | | | | |
| HODFW95 | 194 | 795281 | 1-798 | 15-812 | W93859, W93898, | | | | | |
| | | | | | AA829836, | | | | | |
| | | | | | and AF086497. | | | | | |
| HODFW40 | 195 | 859320 | 1-542 | 15-556 | AA972774, | | | | | |
| | | | | | and AI694547. | | | | | |
| HODFR85 | 196 | 783789 | 1-489 | 15-503 | N76385, AA954669, | | | | | |
| | | | | | N71863, AI041474, | | | | | |
| | | | | | and AI937830. | | | | | |
| HODFL37 | 197 | 948703 | 1-450 | 15-464 | | | | | | |
| HODFJ11 | 198 | 966065 | 1-476 | 15-490 | AA242986, | | | | | |
| | | | | | and AA242787. | | | | | |
| HODFI66 | 199 | 974317 | 1-523 | 15-537 | | | | | | |
| HODFH45 | 200 | 974916 | 1-606 | 15-620 | AL121595. | | | | | |
| HODFG82 | 201 | 779191 | 1-544 | 15-558 | AI733904, | | | | | |
| | | | | | and AA160258. | | | | | |
| HODFF88 | 202 | 974911 | 1-1843 | 15-1857 | D80164, D59502, | | | | | |
| | | | | | D80193, D80195, | | | | | |
| | | | | | D59275, C15076, | | | | | |
| | | | | | D80227, D58283, | | | | | |
| | | | | | D80022, D80166, | | | | | |
| | | | | | D81030, D59859, | | | | | |
| | | | | | D51799, D59619, | | | | | |
| | | | | | D80210, D80391, | | | | | |
| | | | | | D80240, D59787, | | | | | |
| | | | | | D51423, D80253, | | | | | |
| | | | | | D80043, D80269, | | | | | |
| | | | | | D50979, D80212, | | | | | |
| | | | | | D80038, D80196, | | | | | |
| | | | | | D80024, D80219, | | | | | |
| | | | | | D80188, C14331, | | | | | |
| | | | | | D59467, D57483, | | | | | |
| | | | | | D59927, D80378, | | | | | |
| | | | | | D80366, C14389, | | | | | |
| | | | | | D59889, D50995, | | | | | |
| | | | | | D80045, D59610, | | | | | |
| | | | | | AA305409, C14429, | | | | | |
| | | | | | D80241, D51060, | | | | | |
| | | | | | T03269, C14014, | | | | | |
| | | | | | AW178893, C75259, | | | | | |
| | | | | | AA305578, D81026, | | | | | |
| | | | | | D59695, D51022, | | | | | |
| | | | | | AW179328, D81111, | | | | | |
| | | | | | AW178775, D80134, | | | | | |
| | | | | | AW378532, | | | | | |
| | | | | | AW177440, D51250, | | | | | |
| | | | | | AW352158, D80286, | | | | | |
| | | | | | F13647, AA514188, | | | | | |
| | | | | | AW369651, D80251, | | | | | |
| | | | | | D80522, D51079, | | | | | |
| | | | | | D80248, D80949, | | | | | |
| | | | | | D58253, AW178762, | | | | | |
| | | | | | D80168, D52291, | | | | | |
| | | | | | C14227, AA514186, | | | | | |
| | | | | | AI905856, | | | | | |
| | | | | | AW177501, | | | | | |
| | | | | | AW177511, D80133, | | | | | |
| | | | | | Z21582, AW360811, | | | | | |
| | | | | | C05695, C14298, | | | | | |
| | | | | | AW352117, D80064, | | | | | |
| | | | | | AW176467, | | | | | |
| | | | | | AW375405, | | | | | |
| | | | | | AW378540, C14407, | | | | | |
| | | | | | AW377671, D51097, | | | | | |
| | | | | | AW366296, D80302, | | | | | |
| | | | | | AW360844, | | | | | |
| | | | | | AW360817, | | | | | |
| | | | | | AW375406, | | | | | |
| | | | | | AW378534, | | | | | |
| | | | | | AW179332, | | | | | |
| | | | | | AW377672, | | | | | |
| | | | | | AW179023, | | | | | |
| | | | | | AW178905, D80132, | | | | | |
| | | | | | AW360834, | | | | | |
| | | | | | AA285331, D80439, | | | | | |
| | | | | | AW352171, | | | | | |
| | | | | | AW377676, | | | | | |
| | | | | | AW178906, | | | | | |
| | | | | | AW352170, | | | | | |
| | | | | | AW177731, D80247, | | | | | |
| | | | | | AW178907, | | | | | |
| | | | | | AW179019, | | | | | |
| | | | | | AW179024, D51103, | | | | | |
| | | | | | AW177505, | | | | | |
| | | | | | AW360841, | | | | | |
| | | | | | AW179020, | | | | | |
| | | | | | AW178909, | | | | | |
| | | | | | AW177456, | | | | | |
| | | | | | AW179329, | | | | | |
| | | | | | AW178980, | | | | | |
| | | | | | AW177733, | | | | | |
| | | | | | AW378528, | | | | | |
| | | | | | AW178908, | | | | | |
| | | | | | AW178754, | | | | | |
| | | | | | AW179018, | | | | | |
| | | | | | AW179220, | | | | | |
| | | | | | AI557751, | | | | | |
| | | | | | AW179004, | | | | | |
| | | | | | AW178914, | | | | | |
| | | | | | AW378525, | | | | | |
| | | | | | AW352174, T11417, | | | | | |
| | | | | | D80157, AW177728, | | | | | |
| | | | | | D59627, D51759, | | | | | |
| | | | | | AW367967, | | | | | |
| | | | | | AW178774, | | | | | |
| | | | | | AW178911, | | | | | |
| | | | | | AW378543, | | | | | |
| | | | | | AW352163, D59503, | | | | | |
| | | | | | D80258, D80014, | | | | | |
| | | | | | C06015, AI557774, | | | | | |
| | | | | | AW178983, | | | | | |
| | | | | | AW352120, T03116, | | | | | |
| | | | | | AW178781, T48593, | | | | | |
| | | | | | D58246, C14077, | | | | | |
| | | | | | D59653, AW177723, | | | | | |
| | | | | | D58101, D45260, | | | | | |
| | | | | | AI525923, AW178986, | | | | | |
| | | | | | AW367950, C03092, | | | | | |
| | | | | | AA809122, H67854, | | | | | |
| | | | | | D59551, H67866, | | | | | |
| | | | | | C14975, T02974, | | | | | |
| | | | | | AW378533, | | | | | |
| | | | | | AW378539, D51213, | | | | | |
| | | | | | AW177734, | | | | | |
| | | | | | AI535686, D59317, | | | | | |
| | | | | | D51221, AI525917, | | | | | |
| | | | | | C14973, AA514184, | | | | | |
| | | | | | C14344, D45273, | | | | | |
| | | | | | AI525925, AI525920, | | | | | |
| | | | | | D59474, AI525227, | | | | | |
| | | | | | D31458, C14046, | | | | | |
| | | | | | AI525242, AI525235, | | | | | |
| | | | | | T03048, AI525912, | | | | | |
| | | | | | AW378542, | | | | | |
| | | | | | AI525215, AI525237, | | | | | |
| | | | | | C16955, C05763, | | | | | |
| | | | | | Z33452, AI535850, | | | | | |
| | | | | | AI535961, A84916, | | | | | |
| | | | | | AJ132110, A62300, | | | | | |
| | | | | | A62298, AR018138, | | | | | |
| | | | | | X67155, Y17188, | | | | | |
| | | | | | D26022, A25909, | | | | | |
| | | | | | A67220, D89785, | | | | | |
| | | | | | A78862, D34614, | | | | | |
| | | | | | D88547, AF058696, | | | | | |
| | | | | | X82626, AR008278, | | | | | |
| | | | | | AB028859, | | | | | |
| | | | | | AR025207, I82448, | | | | | |
| | | | | | Y12724, A82595, | | | | | |
| | | | | | AB012117, | | | | | |
| | | | | | AR060385, | | | | | |
| | | | | | AB002449, A85396, | | | | | |
| | | | | | AR066482, | | | | | |
| | | | | | A44171, A85477, | | | | | |
| | | | | | A94995, X68127, | | | | | |
| | | | | | I19525, A86792, | | | | | |
| | | | | | X93549, AR008443, | | | | | |
| | | | | | AR016808, U87250, | | | | | |
| | | | | | I50133, I50126, | | | | | |
| | | | | | I50132, I50128, | | | | | |
| | | | | | AR066488, | | | | | |
| | | | | | AR016514, | | | | | |
| | | | | | AR060138, A45456, | | | | | |
| | | | | | A26615, AR052274, | | | | | |
| | | | | | I14842, Y09669, | | | | | |
| | | | | | A43192, A43190, | | | | | |
| | | | | | AR038669, | | | | | |
| | | | | | AR066487, A30438, | | | | | |
| | | | | | AF135125, D88507, | | | | | |
| | | | | | AR066490, D50010, | | | | | |
| | | | | | AR054175, I18367, | | | | | |
| | | | | | Y17187, A63261, | | | | | |
| | | | | | AR008277, | | | | | |
| | | | | | AR008281, | | | | | |
| | | | | | AR008408, | | | | | |
| | | | | | AR062872, A70867, | | | | | |
| | | | | | AB033111, | | | | | |
| | | | | | AR016691, | | | | | |
| | | | | | AR016690, U46128, | | | | | |
| | | | | | D13509, AR060133, | | | | | |
| | | | | | I79511, AR064240, | | | | | |
| | | | | | A64136, A68321, | | | | | |
| | | | | | U87247, AB023656, | | | | | |
| | | | | | U79457, AF123263, | | | | | |
| | | | | | X93535, and | | | | | |
| | | | | | AR008382. | | | | | |
| HODFE04 | 203 | 926999 | 1-429 | 15-443 | R83400. | | | | | |
| HODFD73 | 204 | 909812 | 1-603 | 15-617 | AL050332, | | | | | |
| | | | | | AF050183, AF058790, | | | | | |
| | | | | | AF058789, AF048976, | | | | | |
| | | | | | and AB016962. | | | | | |
| HODFC79 | 205 | 774156 | 1-415 | 15-429 | W93152, and | | | | | |
| | | | | | AW272240. | | | | | |
| HODEZ45 | 206 | 974337 | 1-516 | 15-530 | | | | | | |
| HODEU01 | 207 | 915167 | 1-508 | 15-522 | R93800, T77247, | | | | | |
| | | | | | and R08385. | | | | | |
| HODET07 | 208 | 952194 | 1-410 | 15-424 | H80608. | | | | | |
| HODES10 | 209 | 963474 | 1-186 | 15-200 | AA076702, | | | | | |
| | | | | | and AC004928. | | | | | |
| HODEO35 | 210 | 859364 | 1-124 | 15-138 | AA595928, | | | | | |
| | | | | | AA461421, | | | | | |
| | | | | | and AP000553. | | | | | |
| HODEK82 | 211 | 779245 | 1-673 | 15-687 | AI660692, H96927, | | | | | |
| | | | | | and AI471598. | | | | | |
| HODEI81 | 212 | 909027 | 1-603 | 15-617 | T06177. | | | | | |
| HODEA14 | 213 | 859375 | 1-664 | 15-678 | N44316, L44479, | | | | | |
| | | | | | AW016606, | | | | | |
| | | | | | AA524565, AI809352, | | | | | |
| | | | | | and AC004821. | | | | | |
| HOCPU05 | 214 | 928651 | 1-753 | 15-767 | AI189844, AI201116, | | | | | |
| | | | | | AA609456, | | | | | |
| | | | | | AA584808, | | | | | |
| | | | | | AA780934, AI219194, | | | | | |
| | | | | | and AL022721. | | | | | |
| HOCPH02 | 215 | 917453 | 1-468 | 15-482 | AI610771, AI469844, | | | | | |
| | | | | | N40199, AA588746, | | | | | |
| | | | | | T70544, N39125, | | | | | |
| | | | | | AI937318, AI500487, | | | | | |
| | | | | | R37094, R16096, | | | | | |
| | | | | | AI748890, and | | | | | |
| | | | | | AA258667. | | | | | |
| HOCPF02 | 216 | 917630 | 1-820 | 15-834 | AA280263, | | | | | |
| | | | | | AA403050, and | | | | | |
| | | | | | AL050343. | | | | | |
| HOCOV07 | 217 | 951744 | 1-557 | 15-571 | AA766710, | | | | | |
| | | | | | AA767401, | | | | | |
| | | | | | AA804400, AI860423, | | | | | |
| | | | | | AI753904, AI434653, | | | | | |
| | | | | | N66775, AA555232, | | | | | |
| | | | | | AI357762, W45274, | | | | | |
| | | | | | AA084504, | | | | | |
| | | | | | AW249660, | | | | | |
| | | | | | AI521525, AA846923, | | | | | |
| | | | | | AI571863, | | | | | |
| | | | | | AW249541, | | | | | |
| | | | | | AW020150, | | | | | |
| | | | | | AI926102, AA324559, | | | | | |
| | | | | | AA326603, | | | | | |
| | | | | | AA632024, | | | | | |
| | | | | | AA632024, | | | | | |
| | | | | | AA324059, | | | | | |
| | | | | | AW084445, | | | | | |
| | | | | | AA773098, AI537368, | | | | | |
| | | | | | AW008217, | | | | | |
| | | | | | AA582622, | | | | | |
| | | | | | AC016025, | | | | | |
| | | | | | AC005071, | | | | | |
| | | | | | AC005902, | | | | | |
| | | | | | AC004820, | | | | | |
| | | | | | AC005696, | | | | | |
| | | | | | AC005919, | | | | | |
| | | | | | AL022327, | | | | | |
| | | | | | AC005971, Z82244, | | | | | |
| | | | | | AL121652, | | | | | |
| | | | | | AC007227, | | | | | |
| | | | | | AP000240, | | | | | |
| | | | | | AC005089, | | | | | |
| | | | | | AC005011, | | | | | |
| | | | | | AC006166, | | | | | |
| | | | | | AC004386, | | | | | |
| | | | | | AL096701, | | | | | |
| | | | | | AL021453, | | | | | |
| | | | | | AC007899, | | | | | |
| | | | | | AC004230, | | | | | |
| | | | | | AC004821, | | | | | |
| | | | | | AC005920, | | | | | |
| | | | | | AC016831, | | | | | |
| | | | | | AC002418, | | | | | |
| | | | | | AG004034, | | | | | |
| | | | | | AL022336, Z99716, | | | | | |
| | | | | | AB023051, | | | | | |
| | | | | | AC005412, | | | | | |
| | | | | | AC005913, | | | | | |
| | | | | | AL034420, | | | | | |
| | | | | | AC004223, | | | | | |
| | | | | | AC006449, | | | | | |
| | | | | | AL021808, | | | | | |
| | | | | | AF109907, | | | | | |
| | | | | | AC005907, | | | | | |
| | | | | | AL049795, | | | | | |
| | | | | | ACOO4531, | | | | | |
| | | | | | AF196779, | | | | | |
| | | | | | AL109627, Z94044, | | | | | |
| | | | | | Z98941, AC005046, | | | | | |
| | | | | | AL035685, | | | | | |
| | | | | | AC005081, | | | | | |
| | | | | | AC005084, | | | | | |
| | | | | | AC007308, | | | | | |
| | | | | | AP000501, | | | | | |
| | | | | | AC005562, | | | | | |
| | | | | | AC004991, | | | | | |
| | | | | | AL139054, | | | | | |
| | | | | | AP000512, | | | | | |
| | | | | | AC005839, | | | | | |
| | | | | | AP000500, | | | | | |
| | | | | | AC004099, | | | | | |
| | | | | | AG005325, | | | | | |
| | | | | | AC005399, | | | | | |
| | | | | | AJ003147, AC007216, | | | | | |
| | | | | | AC005874, | | | | | |
| | | | | | AF134471, | | | | | |
| | | | | | AL031311, | | | | | |
| | | | | | AL023575, | | | | | |
| | | | | | AC005296, | | | | | |
| | | | | | AL035249, | | | | | |
| | | | | | AC004834, | | | | | |
| | | | | | AC002554, | | | | | |
| | | | | | AC005667, | | | | | |
| | | | | | AP000096, | | | | | |
| | | | | | AC002492, | | | | | |
| | | | | | AC009247, | | | | | |
| | | | | | AP000356, | | | | | |
| | | | | | AL022326, | | | | | |
| | | | | | AL096775, | | | | | |
| | | | | | AL022316, | | | | | |
| | | | | | AC006040, | | | | | |
| | | | | | AC008009, | | | | | |
| | | | | | AL034417, | | | | | |
| | | | | | AC004967, | | | | | |
| | | | | | AC007686, | | | | | |
| | | | | | AL033392, | | | | | |
| | | | | | AC000159, | | | | | |
| | | | | | AL096763, | | | | | |
| | | | | | AC004019, | | | | | |
| | | | | | AC005736, | | | | | |
| | | | | | AC007225, | | | | | |
| | | | | | ACOO2425, | | | | | |
| | | | | | AF001548, L44140, | | | | | |
| | | | | | AC005015, | | | | | |
| | | | | | AD000092, | | | | | |
| | | | | | AC005972, | | | | | |
| | | | | | AL031133, | | | | | |
| | | | | | AL023281, | | | | | |
| | | | | | AC000353, | | | | | |
| | | | | | AC006953, | | | | | |
| | | | | | AL109865, | | | | | |
| | | | | | AP000248, | | | | | |
| | | | | | AC004150, | | | | | |
| | | | | | AP000152, U91328, | | | | | |
| | | | | | AC006111, | | | | | |
| | | | | | AC006121, | | | | | |
| | | | | | AB003151, | | | | | |
| | | | | | AL034553, | | | | | |
| | | | | | AC005527, | | | | | |
| | | | | | AC005041, | | | | | |
| | | | | | AC006011, | | | | | |
| | | | | | AF196971, | | | | | |
| | | | | | AL022165, | | | | | |
| | | | | | AC007226, | | | | | |
| | | | | | AC005391, | | | | | |
| | | | | | AC004797, | | | | | |
| | | | | | AC005932, | | | | | |
| | | | | | AC008372, | | | | | |
| | | | | | AL133163, | | | | | |
| | | | | | AC004263, | | | | | |
| | | | | | AL050306, Z99714, | | | | | |
| | | | | | AC005231, | | | | | |
| | | | | | AC004686, | | | | | |
| | | | | | AL031284, | | | | | |
| | | | | | AC005754, | | | | | |
| | | | | | AC004789, | | | | | |
| | | | | | AC002310, | | | | | |
| | | | | | AC005225, | | | | | |
| | | | | | AL035400, | | | | | |
| | | | | | AL031680, | | | | | |
| | | | | | AC005377, | | | | | |
| | | | | | AC005821, | | | | | |
| | | | | | AC005682, | | | | | |
| | | | | | AL032821, | | | | | |
| | | | | | AC005187, | | | | | |
| | | | | | AL034379, Z95331, | | | | | |
| | | | | | AL021546, | | | | | |
| | | | | | AC006581, | | | | | |
| | | | | | AC005899, | | | | | |
| | | | | | AL031985, | | | | | |
| | | | | | AC004253, U52112, | | | | | |
| | | | | | AL031295, L47234, | | | | | |
| | | | | | AG005829, | | | | | |
| | | | | | AR036572, Z93930, | | | | | |
| | | | | | AF038458, | | | | | |
| | | | | | AP000555, | | | | | |
| | | | | | AL033527, | | | | | |
| | | | | | AC005094, | | | | | |
| | | | | | AC005049, | | | | | |
| | | | | | AC005023, | | | | | |
| | | | | | AL049839, | | | | | |
| | | | | | AL031602, | | | | | |
| | | | | | AC005755, | | | | | |
| | | | | | AF001548, | | | | | |
| | | | | | AL117330, Z93017, | | | | | |
| | | | | | AC006441, | | | | | |
| | | | | | AL080243, | | | | | |
| | | | | | AC004883, | | | | | |
| | | | | | AC005280, | | | | | |
| | | | | | AC005519, | | | | | |
| | | | | | AL035413, | | | | | |
| | | | | | AC004560, | | | | | |
| | | | | | AL035071, | | | | | |
| | | | | | AL096791, | | | | | |
| | | | | | AC002350, | | | | | |
| | | | | | AC004036, | | | | | |
| | | | | | AC004526, Z84480, | | | | | |
| | | | | | AC003101, | | | | | |
| | | | | | AC004999, | | | | | |
| | | | | | AC004491, | | | | | |
| | | | | | AC006505, | | | | | |
| | | | | | AG005529, | | | | | |
| | | | | | AL121655, | | | | | |
| | | | | | AL022323, | | | | | |
| | | | | | AL049830, | | | | | |
| | | | | | AC004033, | | | | | |
| | | | | | AC007151, | | | | | |
| | | | | | AC005300, | | | | | |
| | | | | | AC007371, U96629, | | | | | |
| | | | | | AC007666, | | | | | |
| | | | | | AL031281, | | | | | |
| | | | | | AF134726, | | | | | |
| | | | | | AC007546, | | | | | |
| | | | | | AL109758, | | | | | |
| | | | | | AL035458, | | | | | |
| | | | | | AC005057, | | | | | |
| | | | | | AP000502, | | | | | |
| | | | | | AC009363, | | | | | |
| | | | | | AL049569, | | | | | |
| | | | | | AC006160, | | | | | |
| | | | | | AC003982, | | | | | |
| | | | | | AC002126, | | | | | |
| | | | | | AL109827, | | | | | |
| | | | | | AC005484, | | | | | |
| | | | | | AL132712, | | | | | |
| | | | | | AC005332, | | | | | |
| | | | | | AL049843, U91321, | | | | | |
| | | | | | and AC005288. | | | | | |
| HOCMM01 | 218 | 914464 | 1-814 | 15-828 | AI348389, AA631606, | | | | | |
| | | | | | and AL031297. | | | | | |
| HOCM124 | 219 | 878363 | 1-512 | 15-526 | AA088637, and | | | | | |
| | | | | | AW298364. | | | | | |
| HOCMC01 | 220 | 914552 | 1-444 | 15-458 | AA699519. | | | | | |
| HKZAH11 | 221 | 965175 | 1-809 | 15-823 | AI653262, AI637996, | | | | | |
| | | | | | AI538731, AA808027, | | | | | |
| | | | | | AL036361, | | | | | |
| | | | | | AI536685, AI811344, | | | | | |
| | | | | | AW087445, | | | | | |
| | | | | | AA470491, AI499381, | | | | | |
| | | | | | AI866090, AI608936, | | | | | |
| | | | | | AI475371, AI270183, | | | | | |
| | | | | | AI491852, | | | | | |
| | | | | | AW088793, | | | | | |
| | | | | | AI590415, | | | | | |
| | | | | | AL079963, | | | | | |
| | | | | | AW132056, | | | | | |
| | | | | | AI284064, AI612913, | | | | | |
| | | | | | AI537677, | | | | | |
| | | | | | AW081036, | | | | | |
| | | | | | AW102785, | | | | | |
| | | | | | AL134259, | | | | | |
| | | | | | AI818980, | | | | | |
| | | | | | AW235482, | | | | | |
| | | | | | AI802542, | | | | | |
| | | | | | AL042745, | | | | | |
| | | | | | AI635461, | | | | | |
| | | | | | AL042382, | | | | | |
| | | | | | AW051258, | | | | | |
| | | | | | AI453322, AI271786, | | | | | |
| | | | | | AW082113, | | | | | |
| | | | | | AI637584, AI819976, | | | | | |
| | | | | | AI819976, AI698391, | | | | | |
| | | | | | AI281773, | | | | | |
| | | | | | AW150578, | | | | | |
| | | | | | AI524671, AI926367, | | | | | |
| | | | | | AI280637, AI559296, | | | | | |
| | | | | | AI862139, AI491775, | | | | | |
| | | | | | AI280747, AI890833, | | | | | |
| | | | | | AI926790, AI564719, | | | | | |
| | | | | | AI863241, AI932794, | | | | | |
| | | | | | AI611738, AI955917, | | | | | |
| | | | | | AI619502, AI677796, | | | | | |
| | | | | | AW129659, | | | | | |
| | | | | | AW026882, | | | | | |
| | | | | | AW104724, | | | | | |
| | | | | | AI610402, AI433157, | | | | | |
| | | | | | AI702073, AI978703, | | | | | |
| | | | | | AI519607, | | | | | |
| | | | | | AW192687, | | | | | |
| | | | | | AI633125, | | | | | |
| | | | | | AI922365, | | | | | |
| | | | | | AL121365, | | | | | |
| | | | | | AI570989, AI697321, | | | | | |
| | | | | | AI521560, AI890223, | | | | | |
| | | | | | AW080746, | | | | | |
| | | | | | AI929108, AI620003, | | | | | |
| | | | | | AI439762, AI269205, | | | | | |
| | | | | | AI889376, | | | | | |
| | | | | | AW081797, | | | | | |
| | | | | | AI632408, AI499285, | | | | | |
| | | | | | AI815855, AI648509, | | | | | |
| | | | | | AI254731, | | | | | |
| | | | | | AL119863, | | | | | |
| | | | | | AI866457, | | | | | |
| | | | | | AL036403, | | | | | |
| | | | | | AW129916, | | | | | |
| | | | | | AI872545, AI571909, | | | | | |
| | | | | | AL045500, | | | | | |
| | | | | | AI569583, AI798456, | | | | | |
| | | | | | AI440448, AI624206, | | | | | |
| | | | | | AI696612, AI922901, | | | | | |
| | | | | | AI274508, AI934259, | | | | | |
| | | | | | AI934259, AI921248, | | | | | |
| | | | | | AI570807, AI431975, | | | | | |
| | | | | | AI783792, | | | | | |
| | | | | | AW198090, N33175, | | | | | |
| | | | | | AI799183, AI285735, | | | | | |
| | | | | | AI287326, AI538085, | | | | | |
| | | | | | AI567769, AI889189, | | | | | |
| | | | | | AW071349, | | | | | |
| | | | | | AI318280, AI636456, | | | | | |
| | | | | | AI815232, AI536638, | | | | | |
| | | | | | AW151485, | | | | | |
| | | | | | AI452876, | | | | | |
| | | | | | AW262565, | | | | | |
| | | | | | AI634751, AI439256, | | | | | |
| | | | | | AW075381, | | | | | |
| | | | | | AI609331, | | | | | |
| | | | | | AL042744, | | | | | |
| | | | | | AI468872, | | | | | |
| | | | | | AW104827, | | | | | |
| | | | | | AI445025, AA225339, | | | | | |
| | | | | | AI679174, | | | | | |
| | | | | | AW074172, | | | | | |
| | | | | | AL036780, | | | | | |
| | | | | | AI355827, AI627988, | | | | | |
| | | | | | AI648663, | | | | | |
| | | | | | AW150453, | | | | | |
| | | | | | AI670009, AI432969, | | | | | |
| | | | | | AW118518, | | | | | |
| | | | | | AW073865, | | | | | |
| | | | | | AI174394, AA806720, | | | | | |
| | | | | | AI871687, | | | | | |
| | | | | | AL042628, | | | | | |
| | | | | | AW074161, | | | | | |
| | | | | | AI923370, AI281772, | | | | | |
| | | | | | AI590227, | | | | | |
| | | | | | AL039086, | | | | | |
| | | | | | AL036901, | | | | | |
| | | | | | AW020561, | | | | | |
| | | | | | AL036736, | | | | | |
| | | | | | AI816010, AI874261, | | | | | |
| | | | | | AL036265, | | | | | |
| | | | | | AI440239, AI285448, | | | | | |
| | | | | | AI865931, AI538259, | | | | | |
| | | | | | AI654276, AI269862, | | | | | |
| | | | | | AI933589, AI491897, | | | | | |
| | | | | | AW080090, | | | | | |
| | | | | | AI625079, | | | | | |
| | | | | | AL047763, | | | | | |
| | | | | | AW148363, | | | | | |
| | | | | | AI684234, | | | | | |
| | | | | | AW192652, | | | | | |
| | | | | | AI434468, | | | | | |
| | | | | | AW160376, | | | | | |
| | | | | | AL044207, | | | | | |
| | | | | | AI873644, AI249800, | | | | | |
| | | | | | AW190042, | | | | | |
| | | | | | AI640873, AI445432, | | | | | |
| | | | | | AI521040, AI499463, | | | | | |
| | | | | | AI859511, AI630928, | | | | | |
| | | | | | AI571439, AI631107, | | | | | |
| | | | | | AI636588, | | | | | |
| | | | | | AW080327, | | | | | |
| | | | | | AI922676, AI567993, | | | | | |
| | | | | | AI687728, | | | | | |
| | | | | | AW088903, | | | | | |
| | | | | | AW076093, | | | | | |
| | | | | | AL043975, | | | | | |
| | | | | | AI567128, | | | | | |
| | | | | | AW162071, | | | | | |
| | | | | | AI801460, AI591420, | | | | | |
| | | | | | AI539771, AI500523, | | | | | |
| | | | | | AI686817, AL048871, | | | | | |
| | | | | | AI306613, AI247293, | | | | | |
| | | | | | AL040241, | | | | | |
| | | | | | AI537273, | | | | | |
| | | | | | AW118496, | | | | | |
| | | | | | AI819326, | | | | | |
| | | | | | AW075667, | | | | | |
| | | | | | AW166903, | | | | | |
| | | | | | AI634737, AI539780, | | | | | |
| | | | | | AI697137, AI591075, | | | | | |
| | | | | | AW148408, | | | | | |
| | | | | | AL045266, | | | | | |
| | | | | | AI572021, AI682798, | | | | | |
| | | | | | AI634345, AI818683, | | | | | |
| | | | | | AI435641, | | | | | |
| | | | | | AW117746, | | | | | |
| | | | | | AI812015, AI610690, | | | | | |
| | | | | | AI921379, AI537024, | | | | | |
| | | | | | AW168671, | | | | | |
| | | | | | AI801152, AI796743, | | | | | |
| | | | | | AI476046, AI886753, | | | | | |
| | | | | | AI687127, AI828682, | | | | | |
| | | | | | AI610307, AI687362, | | | | | |
| | | | | | AI620284, AI252023, | | | | | |
| | | | | | AI918435, | | | | | |
| | | | | | AW050850, | | | | | |
| | | | | | AW193530, | | | | | |
| | | | | | AI609589, | | | | | |
| | | | | | AW073270, | | | | | |
| | | | | | AI457369, AI286256, | | | | | |
| | | | | | AI284517, | | | | | |
| | | | | | AI431327, AI358107, | | | | | |
| | | | | | AI538116, AI247193, | | | | | |
| | | | | | AW166583, | | | | | |
| | | | | | AI567940, AI923124, | | | | | |
| | | | | | AI682971, AI469532, | | | | | |
| | | | | | AF177401, I48979, | | | | | |
| | | | | | I89947, I48978, | | | | | |
| | | | | | AL133560, | | | | | |
| | | | | | AL050277, | | | | | |
| | | | | | AF113019, | | | | | |
| | | | | | A65341, AF113694, | | | | | |
| | | | | | AF111851, | | | | | |
| | | | | | AL122050, | | | | | |
| | | | | | AL117435, | | | | | |
| | | | | | AL137459, | | | | | |
| | | | | | Z82022, A77033, | | | | | |
| | | | | | A77033, A77035, | | | | | |
| | | | | | AF090903, S68736, | | | | | |
| | | | | | A08913, AL137557, | | | | | |
| | | | | | AL137550, | | | | | |
| | | | | | AL122121, A08916, | | | | | |
| | | | | | AL137271, | | | | | |
| | | | | | AF146568, AF090900, | | | | | |
| | | | | | A08910, Y11587, | | | | | |
| | | | | | AL110221, | | | | | |
| | | | | | AF158248, E07108, | | | | | |
| | | | | | AL117457, A58524, | | | | | |
| | | | | | A58523, I88931, | | | | | |
| | | | | | AL050149, | | | | | |
| | | | | | AF090901, I49625, | | | | | |
| | | | | | AF183393, | | | | | |
| | | | | | AL122098, | | | | | |
| | | | | | AL050393, | | | | | |
| | | | | | AR011880, | | | | | |
| | | | | | AF113677, | | | | | |
| | | | | | AL133080, | | | | | |
| | | | | | AL122093, | | | | | |
| | | | | | AF125948, AF104032, | | | | | |
| | | | | | AL110225, X82434, | | | | | |
| | | | | | A08909, Y16645, | | | | | |
| | | | | | I33392, AL117460, | | | | | |
| | | | | | AL137463, X72889, | | | | | |
| | | | | | AJ238278, U358846, | | | | | |
| | | | | | AF113690, | | | | | |
| | | | | | AL133640, | | | | | |
| | | | | | AF078844, X63574, | | | | | |
| | | | | | AF090934, | | | | | |
| | | | | | AL049452, | | | | | |
| | | | | | AF017437, AF090943, | | | | | |
| | | | | | AF017152, | | | | | |
| | | | | | AL133075, | | | | | |
| | | | | | AF113691, AF106862, | | | | | |
| | | | | | AF113013, | | | | | |
| | | | | | AL049314, | | | | | |
| | | | | | AL117583, | | | | | |
| | | | | | AL133606, | | | | | |
| | | | | | AF118094, | | | | | |
| | | | | | AL080124, | | | | | |
| | | | | | AF087943, AF113699, | | | | | |
| | | | | | E02349, AL117585, | | | | | |
| | | | | | AL050138, | | | | | |
| | | | | | AL133565, | | | | | |
| | | | | | AL122123, E03348, | | | | | |
| | | | | | E07361, AF113689, | | | | | |
| | | | | | AL049382, | | | | | |
| | | | | | AL096744, Y11254, | | | | | |
| | | | | | AJ000937, S78214, | | | | | |
| | | | | | AL059146, | | | | | |
| | | | | | AF091084, | | | | | |
| | | | | | AL049430, | | | | | |
| | | | | | AR059958, | | | | | |
| | | | | | AL133016, | | | | | |
| | | | | | AL049466, U80742, | | | | | |
| | | | | | AL133113, | | | | | |
| | | | | | AL049938, | | | | | |
| | | | | | AL049283, | | | | | |
| | | | | | AL133557, | | | | | |
| | | | | | AL050116, U42766, | | | | | |
| | | | | | AL110196, X84990, | | | | | |
| | | | | | L31396, AL050108, | | | | | |
| | | | | | AF090896, AF079765, | | | | | |
| | | | | | L31397, AF118070, | | | | | |
| | | | | | AL080159, | | | | | |
| | | | | | AB019565, | | | | | |
| | | | | | AL080060, | | | | | |
| | | | | | AL049464, | | | | | |
| | | | | | AF113676, AJ242859, | | | | | |
| | | | | | AF125949, AF118064, | | | | | |
| | | | | | AL133093, | | | | | |
| | | | | | AL137538, | | | | | |
| | | | | | AL080137, | | | | | |
| | | | | | AL117394, | | | | | |
| | | | | | AL137527, A12297, | | | | | |
| | | | | | A93016, U00763, | | | | | |
| | | | | | A03736, X65873, | | | | | |
| | | | | | I03321, AL133072, | | | | | |
| | | | | | AL049300, | | | | | |
| | | | | | AF097996, | | | | | |
| | | | | | AL137283, | | | | | |
| | | | | | AL137521, U67958, | | | | | |
| | | | | | AF026124, U91329, | | | | | |
| | | | | | X96540, AL122049, | | | | | |
| | | | | | A08912, X98834, | | | | | |
| | | | | | U72620, X70685, | | | | | |
| | | | | | AL080127, X93495, | | | | | |
| | | | | | AF067728, | | | | | |
| | | | | | AL137429, Z37987, | | | | | |
| | | | | | AL137533, | | | | | |
| | | | | | AL110197, | | | | | |
| | | | | | AL137648, A93350, | | | | | |
| | | | | | I26207, AJ012755, | | | | | |
| | | | | | AF111849, | | | | | |
| | | | | | AL122118, | | | | | |
| | | | | | AF061943, AF111112, | | | | | |
| | | | | | AF057300, AF057299, | | | | | |
| | | | | | AF026816, | | | | | |
| | | | | | AL050172, E08263, | | | | | |
| | | | | | E08264, AL110280, | | | | | |
| | | | | | I42402, AL137480, | | | | | |
| | | | | | I09360, AF185576, | | | | | |
| | | | | | E05822, I00734, | | | | | |
| | | | | | AF119337, E00617, | | | | | |
| | | | | | E00717, E00778, | | | | | |
| | | | | | AL133077, A07647, | | | | | |
| | | | | | E15569, AR013797, | | | | | |
| | | | | | AR000496, | | | | | |
| | | | | | AL137560, U39656, | | | | | |
| | | | | | Y14314, AL133568, | | | | | |
| | | | | | AR038854, AJ006417, | | | | | |
| | | | | | AL136478, S61953, | | | | | |
| | | | | | U49908, AF153205, | | | | | |
| | | | | | I66342, AL133568, | | | | | |
| | | | | | E0221, AR038969, | | | | | |
| | | | | | AL080148, | | | | | |
| | | | | | AF000145, | | | | | |
| | | | | | AL133067, U96683, | | | | | |
| | | | | | U68387, AF008439, | | | | | |
| | | | | | Y09972, AL137476, | | | | | |
| | | | | | AL137523, | | | | | |
| | | | | | AL137292, | | | | | |
| | | | | | AF081197, | | | | | |
| | | | | | AL133104, | | | | | |
| | | | | | AL137529, | | | | | |
| | | | | | AR020905, | | | | | |
| | | | | | AL137556, | | | | | |
| | | | | | AF079763, | | | | | |
| | | | | | AL137526, | | | | | |
| | | | | | AL133665, Z72491, | | | | | |
| | | | | | AL122111, | | | | | |
| | | | | | AL117440, | | | | | |
| | | | | | AF003737, | | | | | |
| | | | | | AC006371, | | | | | |
| | | | | | AF106827, U58996, | | | | | |
| | | | | | IL7767, AF067790, | | | | | |
| | | | | | A08911, E04233, | | | | | |
| | | | | | AL137294, A45787, | | | | | |
| | | | | | AL137488, U78525, | | | | | |
| | | | | | X87582, AL133098, | | | | | |
| | | | | | AF162270, Y07905, | | | | | |
| | | | | | AF081195, AF132676, | | | | | |
| | | | | | AF061836, X87582, | | | | | |
| | | | | | Y10655, AL080074, | | | | | |
| | | | | | AF061981, | | | | | |
| | | | | | AL023657, I09499, | | | | | |
| | | | | | X63580, AF061573, | | | | | |
| | | | | | M30514, L30117, | | | | | |
| | | | | | AF139986, AF095901, | | | | | |
| | | | | | and AF126247. | | | | | |
| HCORB05 | 222 | 928679 | 1-426 | 15-440 | AI343543, AA580865, | | | | | |
| | | | | | AA932494, | | | | | |
| | | | | | AA581041, | | | | | |
| | | | | | AL119399, | | | | | |
| | | | | | AL042544, | | | | | |
| | | | | | AL042382, | | | | | |
| | | | | | AL119457, | | | | | |
| | | | | | AL079794, | | | | | |
| | | | | | AL043168, | | | | | |
| | | | | | AL043152, | | | | | |
| | | | | | AI345347, | | | | | |
| | | | | | AL119511, | | | | | |
| | | | | | AI698391, AI624293, | | | | | |
| | | | | | AI627988, AI890907, | | | | | |
| | | | | | AW161156, | | | | | |
| | | | | | AI002285, | | | | | |
| | | | | | AW130930, | | | | | |
| | | | | | AI868931, AI682798, | | | | | |
| | | | | | AI866770, AI884318, | | | | | |
| | | | | | AW051088, | | | | | |
| | | | | | AI886753, AI572096, | | | | | |
| | | | | | AI270429, AI473536, | | | | | |
| | | | | | AI624120, | | | | | |
| | | | | | AW130534, | | | | | |
| | | | | | AI889189, AI918449, | | | | | |
| | | | | | AI620284, AI538850, | | | | | |
| | | | | | AI587121, AI491775, | | | | | |
| | | | | | AI702073, | | | | | |
| | | | | | AL079963, | | | | | |
| | | | | | AL037454, | | | | | |
| | | | | | AI570807, | | | | | |
| | | | | | AW163834, | | | | | |
| | | | | | AI538055, AI499890, | | | | | |
| | | | | | AL120853, | | | | | |
| | | | | | AI824576, AI433157, | | | | | |
| | | | | | AI916419, AI241923, | | | | | |
| | | | | | AL039086, | | | | | |
| | | | | | AL119863, | | | | | |
| | | | | | AI270183, | | | | | |
| | | | | | AL043355, | | | | | |
| | | | | | AI633125, | | | | | |
| | | | | | AL037582, | | | | | |
| | | | | | AL037602, | | | | | |
| | | | | | AI538564, AI915291, | | | | | |
| | | | | | AW152182, | | | | | |
| | | | | | AI580436, AI670009, | | | | | |
| | | | | | AI918435, | | | | | |
| | | | | | AL038445, | | | | | |
| | | | | | AI445992, AI923989, | | | | | |
| | | | | | AW169604, | | | | | |
| | | | | | AA806720, | | | | | |
| | | | | | AW021117, | | | | | |
| | | | | | AI627893, AI863382, | | | | | |
| | | | | | AL037649, | | | | | |
| | | | | | AI866469, AI493567, | | | | | |
| | | | | | AI917252, | | | | | |
| | | | | | AW080746, | | | | | |
| | | | | | AI500061, | | | | | |
| | | | | | AW192687, | | | | | |
| | | | | | AI866083, AI961589, | | | | | |
| | | | | | AA641818, AI686906, | | | | | |
| | | | | | AI567582, AI267162, | | | | | |
| | | | | | AI799183, AI671642, | | | | | |
| | | | | | AI919500, AI567769, | | | | | |
| | | | | | AI582932, | | | | | |
| | | | | | AL079741, | | | | | |
| | | | | | AI521560, R32821, | | | | | |
| | | | | | AI950729, AI963846, | | | | | |
| | | | | | AW167083, | | | | | |
| | | | | | AI954183, AI612913, | | | | | |
| | | | | | AW050850, | | | | | |
| | | | | | AL121014, | | | | | |
| | | | | | AI802542, | | | | | |
| | | | | | AW238688, | | | | | |
| | | | | | AI623941, | | | | | |
| | | | | | AL036274, W74529, | | | | | |
| | | | | | AI890507, AI207656, | | | | | |
| | | | | | AI969655, | | | | | |
| | | | | | AW129655, | | | | | |
| | | | | | AW129659, | | | | | |
| | | | | | AI446373, | | | | | |
| | | | | | AW131294, | | | | | |
| | | | | | AI579901, | | | | | |
| | | | | | AL036638, | | | | | |
| | | | | | AW129230, | | | | | |
| | | | | | AI919534, | | | | | |
| | | | | | AL041734, | | | | | |
| | | | | | AW151136, | | | | | |
| | | | | | AI445990, AI926878, | | | | | |
| | | | | | AI631095, AI872423, | | | | | |
| | | | | | AI635016, | | | | | |
| | | | | | AL036673, | | | | | |
| | | | | | AI932794, AI536738, | | | | | |
| | | | | | AI434741, AI874261, | | | | | |
| | | | | | AI285448, | | | | | |
| | | | | | AW193911, N29277, | | | | | |
| | | | | | AI766348, AI452560, | | | | | |
| | | | | | AW020397, | | | | | |
| | | | | | AI889376, AI648509, | | | | | |
| | | | | | AI572021, | | | | | |
| | | | | | AW161579, | | | | | |
| | | | | | AI866040, | | | | | |
| | | | | | AL041772, | | | | | |
| | | | | | AI280607, | | | | | |
| | | | | | AW022699, | | | | | |
| | | | | | AI859991, AI537261, | | | | | |
| | | | | | AI623179, AI799408, | | | | | |
| | | | | | AI254226, AI630252, | | | | | |
| | | | | | AI923370, AA579618, | | | | | |
| | | | | | AI440239, | | | | | |
| | | | | | AL038605, | | | | | |
| | | | | | AI434468, | | | | | |
| | | | | | AW162194, | | | | | |
| | | | | | AI345416, AI802240, | | | | | |
| | | | | | AI345612, AI270706 | | | | | |
| | | | | | AW051258, | | | | | |
| | | | | | AL045500, | | | | | |
| | | | | | AW079409, | | | | | |
| | | | | | AI288305, AI554821, | | | | | |
| | | | | | AL134259, | | | | | |
| | | | | | AI690748, | | | | | |
| | | | | | AL046595, | | | | | |
| | | | | | AW303152, | | | | | |
| | | | | | AW026882, | | | | | |
| | | | | | AW020419, | | | | | |
| | | | | | AI609069, AI522052, | | | | | |
| | | | | | AI345415, AA740450, | | | | | |
| | | | | | AI889372, | | | | | |
| | | | | | AL048496, | | | | | |
| | | | | | AW149925, | | | | | |
| | | | | | AI571439, AI860003, | | | | | |
| | | | | | AI800155, AI963458, | | | | | |
| | | | | | AI345778, AA420722, | | | | | |
| | | | | | AW089275, | | | | | |
| | | | | | AI874166, AI702068, | | | | | |
| | | | | | AI702068, AI284517, | | | | | |
| | | | | | AI702406, | | | | | |
| | | | | | AW243886, | | | | | |
| | | | | | AA127565, | | | | | |
| | | | | | AL046200, | | | | | |
| | | | | | AI284484, AI801152, | | | | | |
| | | | | | AI288285, | | | | | |
| | | | | | AW083374, | | | | | |
| | | | | | AI612750, | | | | | |
| | | | | | AW192652, | | | | | |
| | | | | | AL119324, | | | | | |
| | | | | | AI698427, AI540674, | | | | | |
| | | | | | AA540674, N33175, | | | | | |
| | | | | | AI685517, AI559619, | | | | | |
| | | | | | AW020693, | | | | | |
| | | | | | AI471282, AI954504, | | | | | |
| | | | | | AI884528, AI499963, | | | | | |
| | | | | | AW149026, | | | | | |
| | | | | | AI580198, AI493576, | | | | | |
| | | | | | AW198090, | | | | | |
| | | | | | AW118518, | | | | | |
| | | | | | AI917963, AI345745, | | | | | |
| | | | | | AI538764, AI500588, | | | | | |
| | | | | | AI866465, AI284131, | | | | | |
| | | | | | AW090071, | | | | | |
| | | | | | AW160916, | | | | | |
| | | | | | AI651840, AI815232, | | | | | |
| | | | | | AW168452, | | | | | |
| | | | | | AI281452, | | | | | |
| | | | | | AW006032, | | | | | |
| | | | | | AI866457, AI630928, | | | | | |
| | | | | | AI242248, AI439452, | | | | | |
| | | | | | AI590830, AA908294, | | | | | |
| | | | | | AI863191, AI355779, | | | | | |
| | | | | | AI628331, | | | | | |
| | | | | | AW090736, | | | | | |
| | | | | | AI499986, | | | | | |
| | | | | | AW102864, | | | | | |
| | | | | | AI354630, AI619502, | | | | | |
| | | | | | AL040241, | | | | | |
| | | | | | AI951950, | | | | | |
| | | | | | AL036802, | | | | | |
| | | | | | AI768496, | | | | | |
| | | | | | AL121365, | | | | | |
| | | | | | AI870192, AI866090, | | | | | |
| | | | | | AI536574, AI287233, | | | | | |
| | | | | | AI635067, U77594, | | | | | |
| | | | | | Y11587, I89947, | | | | | |
| | | | | | AF139986, I48978, | | | | | |
| | | | | | I33392, Z82022, | | | | | |
| | | | | | AF158248, U35846, | | | | | |
| | | | | | AF090900, A08910, | | | | | |
| | | | | | A08909, AR013797, | | | | | |
| | | | | | AR038854, A77033, | | | | | |
| | | | | | A77035, AF111849, | | | | | |
| | | | | | AF177401, AF126247, | | | | | |
| | | | | | AL122100, | | | | | |
| | | | | | AL133560, | | | | | |
| | | | | | AL080148, | | | | | |
| | | | | | AF113677, | | | | | |
| | | | | | AF183393, | | | | | |
| | | | | | AL133075, | | | | | |
| | | | | | AF030513, A08916, | | | | | |
| | | | | | AF090943, E06743, | | | | | |
| | | | | | AL050277, | | | | | |
| | | | | | AF079763, | | | | | |
| | | | | | AL137479, | | | | | |
| | | | | | AR020905, | | | | | |
| | | | | | AF087943, | | | | | |
| | | | | | AL096744, I09499, | | | | | |
| | | | | | AF111851, | | | | | |
| | | | | | AL133067, X84908, | | | | | |
| | | | | | A08908, AL050092, | | | | | |
| | | | | | I48979, AF090934, | | | | | |
| | | | | | AF067728, E05822, | | | | | |
| | | | | | AL133080, | | | | | |
| | | | | | AL137271, M27260, | | | | | |
| | | | | | AF090903, Y09972, | | | | | |
| | | | | | Y10080, AL137533, | | | | | |
| | | | | | AL133113, | | | | | |
| | | | | | AL050138, | | | | | |
| | | | | | AL137480, | | | | | |
| | | | | | AL133558, Y10936, | | | | | |
| | | | | | AL137294, X52128, | | | | | |
| | | | | | AL133557, | | | | | |
| | | | | | AL117435, A65341, | | | | | |
| | | | | | X70685, AF069506, | | | | | |
| | | | | | AF106657, | | | | | |
| | | | | | AL133072, A08912, | | | | | |
| | | | | | I89931, A93350, | | | | | |
| | | | | | AF061795, | | | | | |
| | | | | | AL050149, | | | | | |
| | | | | | AF151685, | | | | | |
| | | | | | AL137557, I49625, | | | | | |
| | | | | | Y07905, AL133565, | | | | | |
| | | | | | AL137292, | | | | | |
| | | | | | AF078844, AJ000937, | | | | | |
| | | | | | E02349, AL137550, | | | | | |
| | | | | | AF061981, | | | | | |
| | | | | | AL122093, U42766, | | | | | |
| | | | | | Y16645, AL080159, | | | | | |
| | | | | | Y14314, E15569, | | | | | |
| | | | | | AL050393, | | | | | |
| | | | | | AL117583, | | | | | |
| | | | | | AB007812, S78214, | | | | | |
| | | | | | U88966, AF067790, | | | | | |
| | | | | | X87582, AL117460, | | | | | |
| | | | | | AL133016, X83508, | | | | | |
| | | | | | AF091084, AF118070, | | | | | |
| | | | | | AL049430, | | | | | |
| | | | | | AL049382, | | | | | |
| | | | | | AL133640, | | | | | |
| | | | | | AL050116, A45787, | | | | | |
| | | | | | A03736, AL110280, | | | | | |
| | | | | | X82434, AL049314, | | | | | |
| | | | | | AF153205, AF026816, | | | | | |
| | | | | | X81464, AF097996, | | | | | |
| | | | | | AL049283, | | | | | |
| | | | | | AL110196, I46765, | | | | | |
| | | | | | Z37987, AF185576, | | | | | |
| | | | | | U78525, AL137488, | | | | | |
| | | | | | AF106862, A21103, | | | | | |
| | | | | | L19437, AL049452, | | | | | |
| | | | | | AL110221, | | | | | |
| | | | | | AL023657, AJ012755, | | | | | |
| | | | | | AB019565, | | | | | |
| | | | | | AF017152, AF000301, | | | | | |
| | | | | | X72889, AL137529, | | | | | |
| | | | | | AL117457, D16301, | | | | | |
| | | | | | X57961, AL133665, | | | | | |
| | | | | | AL133568, | | | | | |
| | | | | | AL122121, | | | | | |
| | | | | | AF061943, E12747, | | | | | |
| | | | | | A15345, AF111112, | | | | | |
| | | | | | AL122110, | | | | | |
| | | | | | AL050024, A18777, | | | | | |
| | | | | | A08907, AL122050, | | | | | |
| | | | | | AL117416, | | | | | |
| | | | | | AL137521, | | | | | |
| | | | | | AF008439, A08915, | | | | | |
| | | | | | A58524, AL137539, | | | | | |
| | | | | | AF113019, AF118094, | | | | | |
| | | | | | AL049938, | | | | | |
| | | | | | AF113699, | | | | | |
| | | | | | AL122106, | | | | | |
| | | | | | AF090901, | | | | | |
| | | | | | AR034821, | | | | | |
| | | | | | AF061573, AF113690, | | | | | |
| | | | | | S36676, AL137560, | | | | | |
| | | | | | AL049466, A76335, | | | | | |
| | | | | | X80340, AL080234, | | | | | |
| | | | | | AL117394, L04504, | | | | | |
| | | | | | AL080163, | | | | | |
| | | | | | AF081197, AF113691, | | | | | |
| | | | | | AL050366, D83032, | | | | | |
| | | | | | I00734, AL137463, | | | | | |
| | | | | | AF119337, AF113694, | | | | | |
| | | | | | AF100931, AF017437, | | | | | |
| | | | | | AL137283, | | | | | |
| | | | | | AF132676, Z72491, | | | | | |
| | | | | | AF106827, AF061836, | | | | | |
| | | | | | U58996, AL137459, | | | | | |
| | | | | | AL080158, | | | | | |
| | | | | | AF026124, AF090886, | | | | | |
| | | | | | E00617, E00717, | | | | | |
| | | | | | E00778, AL050146, | | | | | |
| | | | | | AL050108, U80742, | | | | | |
| | | | | | A12297, E02221, | | | | | |
| | | | | | AF079765, AF032666, | | | | | |
| | | | | | AF057300, AF057299, | | | | | |
| | | | | | X98834, U72620, | | | | | |
| | | | | | AR011880, | | | | | |
| | | | | | AL137537, | | | | | |
| | | | | | AC002467, S76508, | | | | | |
| | | | | | I89934, X06146, | | | | | |
| | | | | | AL137478, X92070, | | | | | |
| | | | | | AL110225, | | | | | |
| | | | | | AF146568, AJ005690, | | | | | |
| | | | | | AL049465, X96540, | | | | | |
| | | | | | AL110218, | | | | | |
| | | | | | AL080074, | | | | | |
| | | | | | AL137640, I03321, | | | | | |
| | | | | | AL137538, | | | | | |
| | | | | | AF039138, AF039137, | | | | | |
| | | | | | AL122118, | | | | | |
| | | | | | AL050155, | | | | | |
| | | | | | AF081195, AF028823, | | | | | |
| | | | | | M86826, AL117649, | | | | | |
| | | | | | E07108, AF162270, | | | | | |
| | | | | | A07647, AF125948, | | | | | |
| | | | | | I66342, X93495, | | | | | |
| | | | | | E01614, E13364, | | | | | |
| | | | | | AL137476, | | | | | |
| | | | | | AL080124, A08911, | | | | | |
| | | | | | AL049300, X79812, | | | | | |
| | | | | | Y11254, I42402, | | | | | |
| | | | | | and AL133098. | | | | | |
| HCOPM06 | 223 | 933473 | 1-616 | 15-630 | AI494320, AI289626, | | | | | |
| | | | | | AA349607, | | | | | |
| | | | | | and AC004230. | | | | | |
| HCOPI07 | 224 | 951645 | 1-399 | 15-413 | AA683346, AI991127, | | | | | |
| | | | | | and AW385510. | | | | | |
| HCOPF07 | 225 | 951655 | 1-476 | 15-490 | AI027619, AA926665, | | | | | |
| | | | | | AA954546, | | | | | |
| | | | | | AA398085, | | | | | |
| | | | | | AA621275, | | | | | |
| | | | | | AA634531, | | | | | |
| | | | | | and AA724256. | | | | | |
| HCOOF07 | 226 | 951693 | 1-504 | 15-518 | AI160370, AA993156, | | | | | |
| | | | | | and AW269609. | | | | | |
| HCONP02 | 227 | 917577 | 1-332 | 15-346 | AA226397, H29285, | | | | | |
| | | | | | Z39193, and D61466. | | | | | |
| HCONM33 | 228 | 971637 | 1-463 | 15-477 | AI339840, N40932, | | | | | |
| | | | | | AW044507, | | | | | |
| | | | | | AI216527, AI620878, | | | | | |
| | | | | | AW316937, | | | | | |
| | | | | | AI292180, | | | | | |
| | | | | | AI358083, AI954691, | | | | | |
| | | | | | AW006263, | | | | | |
| | | | | | AA321122, | | | | | |
| | | | | | AA321123, AI654341, | | | | | |
| | | | | | N46790, AI953114, | | | | | |
| | | | | | N69895, AI970523, | | | | | |
| | | | | | AA226346, | | | | | |
| | | | | | AA226347, | | | | | |
| | | | | | and AF196969. | | | | | |
| HCOMM05 | 229 | 925952 | 1-1647 | 15- | AI681802, AA534542, | | | | | |
| | | | | 1661 | AL044632, | | | | | |
| | | | | | AI912061, AI912050, | | | | | |
| | | | | | AI271683, AA587766, | | | | | |
| | | | | | AA143726, | | | | | |
| | | | | | AA565889, AI298280, | | | | | |
| | | | | | AA079779, AI983603, | | | | | |
| | | | | | AI052230, AI369272, | | | | | |
| | | | | | AI148467, AI028441, | | | | | |
| | | | | | N93876, AI950520, | | | | | |
| | | | | | AW024410, | | | | | |
| | | | | | AW138648, | | | | | |
| | | | | | AI933105, AI244430, | | | | | |
| | | | | | AA436795, | | | | | |
| | | | | | AA583571, | | | | | |
| | | | | | AA079751, | | | | | |
| | | | | | AA595313, | | | | | |
| | | | | | AA158795, AI373637, | | | | | |
| | | | | | AA947417, R27340, | | | | | |
| | | | | | AW182724, | | | | | |
| | | | | | AW381284, | | | | | |
| | | | | | AJ869920, AI348932, | | | | | |
| | | | | | AI244362, AI335320, | | | | | |
| | | | | | AI305978, AI991003, | | | | | |
| | | | | | AI250467, AI335365, | | | | | |
| | | | | | AI611516, AI252717, | | | | | |
| | | | | | AW086414, | | | | | |
| | | | | | AI252210, AI310178, | | | | | |
| | | | | | AI252203, AI345138, | | | | | |
| | | | | | AI308005, AI310659, | | | | | |
| | | | | | AI250541, AI311180, | | | | | |
| | | | | | AI250964, | | | | | |
| | | | | | AW301779, | | | | | |
| | | | | | AI348928, | | | | | |
| | | | | | AW086115, | | | | | |
| | | | | | AI250009, AI311179, | | | | | |
| | | | | | AI345868, AI305732, | | | | | |
| | | | | | AI311504, | | | | | |
| | | | | | AW303046, | | | | | |
| | | | | | AI269522, AI254155, | | | | | |
| | | | | | AI335130, | | | | | |
| | | | | | AW301495, | | | | | |
| | | | | | AI251162, AI862506, | | | | | |
| | | | | | AI371584, AI311043, | | | | | |
| | | | | | AI251045, AI590436, | | | | | |
| | | | | | AI284537, AI310038, | | | | | |
| | | | | | AW301422, | | | | | |
| | | | | | AI224292, AI252538, | | | | | |
| | | | | | AI053635, AA158794, | | | | | |
| | | | | | AI862262, | | | | | |
| | | | | | AW268255, D31472, | | | | | |
| | | | | | AI685886, | | | | | |
| | | | | | AW371409, | | | | | |
| | | | | | AI540612, | | | | | |
| | | | | | AW071370, W40369, | | | | | |
| | | | | | AI886550, | | | | | |
| | | | | | AW371414, | | | | | |
| | | | | | AI955911, AI024888, | | | | | |
| | | | | | AA143739, AI254135, | | | | | |
| | | | | | AI246935, | | | | | |
| | | | | | AW177721, T35070, | | | | | |
| | | | | | C00345, AW371416, | | | | | |
| | | | | | AA902848, | | | | | |
| | | | | | AW369434, | | | | | |
| | | | | | AA581215, | | | | | |
| | | | | | AW117919, | | | | | |
| | | | | | AI932915, AI554245, | | | | | |
| | | | | | AW132056, | | | | | |
| | | | | | AI800433, N80094, | | | | | |
| | | | | | AI358213, | | | | | |
| | | | | | AW088899, | | | | | |
| | | | | | AI539153, AI919107, | | | | | |
| | | | | | AI680457, AI802833, | | | | | |
| | | | | | AW020095, | | | | | |
| | | | | | AA946741, AI698401, | | | | | |
| | | | | | AL110306, | | | | | |
| | | | | | AW118396, | | | | | |
| | | | | | AI251830, | | | | | |
| | | | | | AL041772, | | | | | |
| | | | | | AI805769, AI929108, | | | | | |
| | | | | | AI468872, AI251205, | | | | | |
| | | | | | AI888621, | | | | | |
| | | | | | AL046356, | | | | | |
| | | | | | AW195957, | | | | | |
| | | | | | AW002342, | | | | | |
| | | | | | AI889953, AI659795, | | | | | |
| | | | | | AI520809, AI569309, | | | | | |
| | | | | | AW151785, | | | | | |
| | | | | | AI498579, AI478123, | | | | | |
| | | | | | AL119791, | | | | | |
| | | | | | AI922901, | | | | | |
| | | | | | AW198075, | | | | | |
| | | | | | AW088134, | | | | | |
| | | | | | AI432736, AI610645, | | | | | |
| | | | | | AI587606, AI699011, | | | | | |
| | | | | | AI476109, AI697324, | | | | | |
| | | | | | AI335214, | | | | | |
| | | | | | AW081255, | | | | | |
| | | | | | AI868831, | | | | | |
| | | | | | AW073994, | | | | | |
| | | | | | AI888944, | | | | | |
| | | | | | AW189415, | | | | | |
| | | | | | AI280670, AI590686, | | | | | |
| | | | | | AI783861, | | | | | |
| | | | | | AL119863, | | | | | |
| | | | | | AI866608, AI886124, | | | | | |
| | | | | | AI345746, AI680498, | | | | | |
| | | | | | AI628217, AI802240, | | | | | |
| | | | | | AL040241, | | | | | |
| | | | | | AI687065, AI469738, | | | | | |
| | | | | | AI805688, A1249877, | | | | | |
| | | | | | AI345677, AI952920, | | | | | |
| | | | | | AI411909, AI633062, | | | | | |
| | | | | | AW406745, | | | | | |
| | | | | | AI343059, AI376180, | | | | | |
| | | | | | AW168031, | | | | | |
| | | | | | AI682743, AI349933, | | | | | |
| | | | | | AI689175, AI345608, | | | | | |
| | | | | | AW084219, | | | | | |
| | | | | | AW103886, | | | | | |
| | | | | | AI933785, AI633419, | | | | | |
| | | | | | AI922577, | | | | | |
| | | | | | AW071417, | | | | | |
| | | | | | AI554218, AA225339, | | | | | |
| | | | | | AI866002, AI433976, | | | | | |
| | | | | | AI800138, AI828731, | | | | | |
| | | | | | AW079159, | | | | | |
| | | | | | AW191844, | | | | | |
| | | | | | AI618716, AI696626, | | | | | |
| | | | | | AI824576, AI612759, | | | | | |
| | | | | | AW089179, | | | | | |
| | | | | | AW151729, | | | | | |
| | | | | | AI696819, AI867042, | | | | | |
| | | | | | AI566630, AI689571, | | | | | |
| | | | | | AI280661, AI636619, | | | | | |
| | | | | | AI955866, AI537617, | | | | | |
| | | | | | AI919345, AI800453, | | | | | |
| | | | | | AI812015, | | | | | |
| | | | | | AW105620, | | | | | |
| | | | | | AI961310, AI963216, | | | | | |
| | | | | | AI590120, AI494201, | | | | | |
| | | | | | AW082594, | | | | | |
| | | | | | AI627880, AI308032, | | | | | |
| | | | | | AI282326, AI866770, | | | | | |
| | | | | | AI400725, AI345471, | | | | | |
| | | | | | AI366549, | | | | | |
| | | | | | AW148716, | | | | | |
| | | | | | AI636719, AI344785, | | | | | |
| | | | | | AI249962, AI866741, | | | | | |
| | | | | | AI868931, | | | | | |
| | | | | | AL043326, | | | | | |
| | | | | | AW020693, | | | | | |
| | | | | | AI801322, | | | | | |
| | | | | | AW088903, | | | | | |
| | | | | | AW151714, | | | | | |
| | | | | | AI364788, | | | | | |
| | | | | | AW085681, | | | | | |
| | | | | | AW129230, | | | | | |
| | | | | | AI611743, AI471361, | | | | | |
| | | | | | AW083804, | | | | | |
| | | | | | AI493559, AI628833, | | | | | |
| | | | | | AI696533, AI589993, | | | | | |
| | | | | | AI365256, | | | | | |
| | | | | | AW151136, | | | | | |
| | | | | | AI539771, | | | | | |
| | | | | | AW059837, | | | | | |
| | | | | | AL137526, I48978, | | | | | |
| | | | | | AL050138, | | | | | |
| | | | | | AL080127, | | | | | |
| | | | | | AF078844, A65341, | | | | | |
| | | | | | AL122098, I42402, | | | | | |
| | | | | | A08916, I48979, | | | | | |
| | | | | | AL080060, I89947, | | | | | |
| | | | | | AF026816, X84990, | | | | | |
| | | | | | A08913, I89931, | | | | | |
| | | | | | AF158248, A08910, | | | | | |
| | | | | | I49625, AF061943, | | | | | |
| | | | | | A08909, AF017152, | | | | | |
| | | | | | AL049382, | | | | | |
| | | | | | AL050277, | | | | | |
| | | | | | AF125949, | | | | | |
| | | | | | AF104032, | | | | | |
| | | | | | AL137538, S68736, | | | | | |
| | | | | | AL080074, | | | | | |
| | | | | | AF177401, | | | | | |
| | | | | | AL133014, | | | | | |
| | | | | | AL122121, | | | | | |
| | | | | | AF162270, S78214, | | | | | |
| | | | | | AL122093, | | | | | |
| | | | | | AL133606, | | | | | |
| | | | | | AF003737, AF113689, | | | | | |
| | | | | | U67958, AR059958, | | | | | |
| | | | | | A45787, AL117440, | | | | | |
| | | | | | AF111112, | | | | | |
| | | | | | AL137556, E03348, | | | | | |
| | | | | | AR000496, U39656, | | | | | |
| | | | | | U96683, AL133560, | | | | | |
| | | | | | AR038969, | | | | | |
| | | | | | Y11587, AL137271, | | | | | |
| | | | | | AL133093, | | | | | |
| | | | | | AL050146, | | | | | |
| | | | | | AL080137, A08912, | | | | | |
| | | | | | Y16645, AL137527, | | | | | |
| | | | | | AF081197, | | | | | |
| | | | | | AL110196, I33392, | | | | | |
| | | | | | AL117394, X93495, | | | | | |
| | | | | | AL137463, | | | | | |
| | | | | | AB019565, I26207, | | | | | |
| | | | | | AR038854, | | | | | |
| | | | | | AL137478, | | | | | |
| | | | | | AL133640, | | | | | |
| | | | | | AL133081, L30117, | | | | | |
| | | | | | AF113691, AF008439, | | | | | |
| | | | | | U72620, AL133104, | | | | | |
| | | | | | AF097996, X87582, | | | | | |
| | | | | | E05822, AL050024, | | | | | |
| | | | | | A77033, A77035, | | | | | |
| | | | | | X70685, AL049314, | | | | | |
| | | | | | X92070, AL110221, | | | | | |
| | | | | | AL133016, X96540, | | | | | |
| | | | | | AL133565, X72889, | | | | | |
| | | | | | AF113019, I09360, | | | | | |
| | | | | | AL117460, Z37987, | | | | | |
| | | | | | AL133075, Y14314, | | | | | |
| | | | | | AL050149, | | | | | |
| | | | | | AL133077, A58524, | | | | | |
| | | | | | A58523, A93016, | | | | | |
| | | | | | AR013797, | | | | | |
| | | | | | AF111849, | | | | | |
| | | | | | AL117585, | | | | | |
| | | | | | AF026124, | | | | | |
| | | | | | AL137521, | | | | | |
| | | | | | AF081195, | | | | | |
| | | | | | AR011880, AJ242859, | | | | | |
| | | | | | Y09972, AF113676, | | | | | |
| | | | | | AF090896, E02221, | | | | | |
| | | | | | AF079765, E04233, | | | | | |
| | | | | | S61953, AF091084, | | | | | |
| | | | | | AF100931, AF183393, | | | | | |
| | | | | | E07108, A07647, | | | | | |
| | | | | | AL080124, | | | | | |
| | | | | | AL137476, | | | | | |
| | | | | | AF119337, AF113690, | | | | | |
| | | | | | AF067728, X63574, | | | | | |
| | | | | | U00763, X53587, | | | | | |
| | | | | | AL049466, | | | | | |
| | | | | | AF090934, | | | | | |
| | | | | | AL122049, | | | | | |
| | | | | | AF118064, AF118070, | | | | | |
| | | | | | AL122050, | | | | | |
| | | | | | AL080159, | | | | | |
| | | | | | AL133098, | | | | | |
| | | | | | AL133557, | | | | | |
| | | | | | AF113013, | | | | | |
| | | | | | AL096744, | | | | | |
| | | | | | AL133568, | | | | | |
| | | | | | AF146568, U80742, | | | | | |
| | | | | | AL133113, | | | | | |
| | | | | | AF106862, AF057300, | | | | | |
| | | | | | AF057299, | | | | | |
| | | | | | AL137557, A12297, | | | | | |
| | | | | | AL0S0393, X82434, | | | | | |
| | | | | | AL137459, Z82022, | | | | | |
| | | | | | AL050108, | | | | | |
| | | | | | AF185576, U78525, | | | | | |
| | | | | | AJ006417, | | | | | |
| | | | | | AL122110, | | | | | |
| | | | | | AL133067, I03321, | | | | | |
| | | | | | AL049300, | | | | | |
| | | | | | AF090943, | | | | | |
| | | | | | AL049283, | | | | | |
| | | | | | AF113699, E15569, | | | | | |
| | | | | | AL117457, | | | | | |
| | | | | | AL049464, X65873, | | | | | |
| | | | | | A03736, AF067790, | | | | | |
| | | | | | AL049452, A90832, | | | | | |
| | | | | | X62580, AL133645, | | | | | |
| | | | | | AL137550, | | | | | |
| | | | | | AL050116, I00734, | | | | | |
| | | | | | AF090901, U35846, | | | | | |
| | | | | | AF111851, AF113694, | | | | | |
| | | | | | AF017437, AF113677, | | | | | |
| | | | | | L19437, AF118094, | | | | | |
| | | | | | Y11254, AJ000937, | | | | | |
| | | | | | AL133080, | | | | | |
| | | | | | AF087943, | | | | | |
| | | | | | AL049430, | | | | | |
| | | | | | AL137560, | | | | | |
| | | | | | AF132676, Z72491, | | | | | |
| | | | | | E02349, AF061836, | | | | | |
| | | | | | M30514, U58996, | | | | | |
| | | | | | AL122111, | | | | | |
| | | | | | AF210052, | | | | | |
| | | | | | AL117583, | | | | | |
| | | | | | AL137648, | | | | | |
| | | | | | AF079763, AF153205, | | | | | |
| | | | | | AJ238278, A93350, | | | | | |
| | | | | | AF090900, AF090903, | | | | | |
| | | | | | E08631, AF125948, | | | | | |
| | | | | | L31396, AL137533, | | | | | |
| | | | | | E00617, E00717, | | | | | |
| | | | | | E00778, U68387, | | | | | |
| | | | | | AL110225, Y07905, | | | | | |
| | | | | | AL117435, | | | | | |
| | | | | | AL133072, | | | | | |
| | | | | | U42766, AL117432, | | | | | |
| | | | | | L31397, AL137480, | | | | | |
| | | | | | U91329, AJ012755, | | | | | |
| | | | | | AL110280, X98834, | | | | | |
| | | | | | AL122123, E08263, | | | | | |
| | | | | | E08264, E07361, | | | | | |
| | | | | | AL137300, I41145, | | | | | |
| | | | | | AL137294, | | | | | |
| | | | | | AL050172, | | | | | |
| | | | | | AL137273, | | | | | |
| | | | | | AL080086, | | | | | |
| | | | | | AL133665, | | | | | |
| | | | | | AL122118, | | | | | |
| | | | | | AL137292, | | | | | |
| | | | | | AC002467, | | | | | |
| | | | | | AL137283, A18777, | | | | | |
| | | | | | AL137705, | | | | | |
| | | | | | AL049938, | | | | | |
| | | | | | AL110197, | | | | | |
| | | | | | AL117649, E06743, | | | | | |
| | | | | | AF051325, AF061795, | | | | | |
| | | | | | AI284538, and | | | | | |
| | | | | | AI335140. | | | | | |
| HCBND03 | 230 | 922388 | 1-864 | 15-878 | AI702961, AI630765, | | | | | |
| | | | | | AW341780, | | | | | |
| | | | | | AA931671, | | | | | |
| | | | | | AW452292, | | | | | |
| | | | | | and U46356. | | | | | |
| HCBMZ07 | 231 | 951788 | 1-345 | 15-359 | N30431, AA579184, | | | | | |
| | | | | | AI791610, AA176605, | | | | | |
| | | | | | F19258, AW438916, | | | | | |
| | | | | | AA015691, | | | | | |
| | | | | | AW265654, | | | | | |
| | | | | | AI305766, | | | | | |
| | | | | | AW157005, | | | | | |
| | | | | | AI028510, AI620585, | | | | | |
| | | | | | AI565245, AI783911, | | | | | |
| | | | | | AA772016, | | | | | |
| | | | | | AA879053, | | | | | |
| | | | | | AA992126, H79308, | | | | | |
| | | | | | AA904137, W21392, | | | | | |
| | | | | | AA128757, | | | | | |
| | | | | | AA947837, | | | | | |
| | | | | | AA077817, | | | | | |
| | | | | | AA657835, | | | | | |
| | | | | | AA230143, | | | | | |
| | | | | | AA743811, AI090334, | | | | | |
| | | | | | AI051037, AI982634, | | | | | |
| | | | | | T40612, F29989, | | | | | |
| | | | | | AL043098, | | | | | |
| | | | | | AA865262, | | | | | |
| | | | | | AL039309, | | | | | |
| | | | | | AI244254, AI709174, | | | | | |
| | | | | | AI358971, | | | | | |
| | | | | | AW274197, | | | | | |
| | | | | | AI821467, AA054106, | | | | | |
| | | | | | AA300061, AI951436, | | | | | |
| | | | | | AI499094, F31654, | | | | | |
| | | | | | AI358226, AA226584, | | | | | |
| | | | | | AW406755, H72688, | | | | | |
| | | | | | AI365988, N52796, | | | | | |
| | | | | | AA747243, R85717, | | | | | |
| | | | | | AW339687, | | | | | |
| | | | | | AW069807, | | | | | |
| | | | | | AA629702, AI635272, | | | | | |
| | | | | | AA743956, | | | | | |
| | | | | | AL049610, | | | | | |
| | | | | | AC002350, | | | | | |
| | | | | | AC009396, | | | | | |
| | | | | | AP001138, AF067846, | | | | | |
| | | | | | AL049633, Z83819, | | | | | |
| | | | | | Z98051, AC002418, | | | | | |
| | | | | | AC005412, | | | | | |
| | | | | | AL031774, | | | | | |
| | | | | | AL031393, Z72521, | | | | | |
| | | | | | AP000691, M87914, | | | | | |
| | | | | | AC002369, | | | | | |
| | | | | | AL031846, | | | | | |
| | | | | | AC007304, | | | | | |
| | | | | | AC005164, | | | | | |
| | | | | | AL033381, | | | | | |
| | | | | | AC006160, | | | | | |
| | | | | | AC004651, | | | | | |
| | | | | | AL109627, | | | | | |
| | | | | | AL022313, | | | | | |
| | | | | | AP000011, AP000152, | | | | | |
| | | | | | AF140763, | | | | | |
| | | | | | AL009172, | | | | | |
| | | | | | AL021918, | | | | | |
| | | | | | AC004904, | | | | | |
| | | | | | AC005940, | | | | | |
| | | | | | AC001066, | | | | | |
| | | | | | AC006254, | | | | | |
| | | | | | AC004386, L81893, | | | | | |
| | | | | | AC004381, | | | | | |
| | | | | | AC004231, | | | | | |
| | | | | | AC002425, | | | | | |
| | | | | | AC005736, | | | | | |
| | | | | | AP000348, | | | | | |
| | | | | | AC006539, | | | | | |
| | | | | | AP000045, | | | | | |
| | | | | | AC007736, | | | | | |
| | | | | | AL050333, Z83843, | | | | | |
| | | | | | AP000114, | | | | | |
| | | | | | AC005971, | | | | | |
| | | | | | AP000503, | | | | | |
| | | | | | AC008134, L35681, | | | | | |
| | | | | | AF001552, | | | | | |
| | | | | | AL049856, | | | | | |
| | | | | | AL121655, | | | | | |
| | | | | | AC004019, | | | | | |
| | | | | | AC002316, | | | | | |
| | | | | | AC005832, | | | | | |
| | | | | | AL133245, | | | | | |
| | | | | | AL008731, | | | | | |
| | | | | | AC004983, | | | | | |
| | | | | | AC007226, | | | | | |
| | | | | | AC004882, | | | | | |
| | | | | | AC007055, | | | | | |
| | | | | | AC005914, | | | | | |
| | | | | | AC005390, | | | | | |
| | | | | | AC007450, | | | | | |
| | | | | | AB023052, | | | | | |
| | | | | | AL031673, | | | | | |
| | | | | | AC002059, | | | | | |
| | | | | | AC004388, | | | | | |
| | | | | | AL031053, | | | | | |
| | | | | | AF148319, | | | | | |
| | | | | | AC005578, | | | | | |
| | | | | | AC004167, | | | | | |
| | | | | | AC009510, | | | | | |
| | | | | | AC005003, Z84480, | | | | | |
| | | | | | AP000047, | | | | | |
| | | | | | AC006409, | | | | | |
| | | | | | AP000557, | | | | | |
| | | | | | AL109980, | | | | | |
| | | | | | AF196779, | | | | | |
| | | | | | AC009516, | | | | | |
| | | | | | AC003101, | | | | | |
| | | | | | AL109628, | | | | | |
| | | | | | AL096791, Z83840, | | | | | |
| | | | | | AC002558, | | | | | |
| | | | | | AL022578, | | | | | |
| | | | | | AC004253, | | | | | |
| | | | | | AC006381, | | | | | |
| | | | | | AF091512, | | | | | |
| | | | | | AC006037, Z85987, | | | | | |
| | | | | | AC005062, | | | | | |
| | | | | | AL021392, | | | | | |
| | | | | | AF053356, | | | | | |
| | | | | | AC004594, | | | | | |
| | | | | | AC005365, | | | | | |
| | | | | | AC006077, | | | | | |
| | | | | | AL031005, | | | | | |
| | | | | | AL096699, | | | | | |
| | | | | | AL031391, U91321, | | | | | |
| | | | | | AC005796, | | | | | |
| | | | | | AL050307, | | | | | |
| | | | | | AP000556, AP000513, | | | | | |
| | | | | | AP000115, AL031662, | | | | | |
| | | | | | AC012099, | | | | | |
| | | | | | AF061325, | | | | | |
| | | | | | AC005703, | | | | | |
| | | | | | AC007514, | | | | | |
| | | | | | AC001530, | | | | | |
| | | | | | AC005484, | | | | | |
| | | | | | AP000356, U14702, | | | | | |
| | | | | | AC012384, | | | | | |
| | | | | | AC005907, | | | | | |
| | | | | | AP000308, AP000048, | | | | | |
| | | | | | AC004699, | | | | | |
| | | | | | AL049745, | | | | | |
| | | | | | AC002295, | | | | | |
| | | | | | AL080317, | | | | | |
| | | | | | AC006552, | | | | | |
| | | | | | AC004027, | | | | | |
| | | | | | AC003982, | | | | | |
| | | | | | AF147277, | | | | | |
| | | | | | AC002565, | | | | | |
| | | | | | AL033518, | | | | | |
| | | | | | AC012627, | | | | | |
| | | | | | AL021395, | | | | | |
| | | | | | AC006948, | | | | | |
| | | | | | AC005838, | | | | | |
| | | | | | AC005212, | | | | | |
| | | | | | AC006011, | | | | | |
| | | | | | AC004087, | | | | | |
| | | | | | AL031770, | | | | | |
| | | | | | AC000041, | | | | | |
| | | | | | AC020663, | | | | | |
| | | | | | AL137434, | | | | | |
| | | | | | AP000690, AJ003147, | | | | | |
| | | | | | AC004678, | | | | | |
| | | | | | AL049588, | | | | | |
| | | | | | AC007263, | | | | | |
| | | | | | AL096701, | | | | | |
| | | | | | AC005785, | | | | | |
| | | | | | AC004134, | | | | | |
| | | | | | AC002487, U63834, | | | | | |
| | | | | | AP000502, AP000517, | | | | | |
| | | | | | AP000032, | | | | | |
| | | | | | AL049694, | | | | | |
| | | | | | AL121825, | | | | | |
| | | | | | AL109799, | | | | | |
| | | | | | AC005837, Z84572, | | | | | |
| | | | | | AC004460, | | | | | |
| | | | | | AL021878, | | | | | |
| | | | | | AC005089, | | | | | |
| | | | | | AC004453, Z70289, | | | | | |
| | | | | | AC005406, | | | | | |
| | | | | | AC005406, | | | | | |
| | | | | | AC008394, | | | | | |
| | | | | | AC007676, Z85999, | | | | | |
| | | | | | AC006057, | | | | | |
| | | | | | AC005972, | | | | | |
| | | | | | AC007041, | | | | | |
| | | | | | AC004963, | | | | | |
| | | | | | AC003037, | | | | | |
| | | | | | AC007536, | | | | | |
| | | | | | AC007308, | | | | | |
| | | | | | AF106656, | | | | | |
| | | | | | AC004988, | | | | | |
| | | | | | AC004805, | | | | | |
| | | | | | AC003954, | | | | | |
| | | | | | AC005399, Z85996, | | | | | |
| | | | | | AC005366, | | | | | |
| | | | | | AC002470, | | | | | |
| | | | | | AC005839, Z81369, | | | | | |
| | | | | | AC005808, | | | | | |
| | | | | | AC004832, | | | | | |
| | | | | | AC004263, | | | | | |
| | | | | | AB023054, | | | | | |
| | | | | | AL049828, | | | | | |
| | | | | | AL035422, | | | | | |
| | | | | | AC005071, | | | | | |
| | | | | | AC005523, and | | | | | |
| | | | | | AC006166. | | | | | |
| HCBMY10 | 232 | 961718 | 1-478 | 15-492 | T53770, AW069769, | | | | | |
| | | | | | AA487272, AI612070, | | | | | |
| | | | | | AA582073, | | | | | |
| | | | | | AA832175, AI611533, | | | | | |
| | | | | | AA760808, | | | | | |
| | | | | | AA508359, | | | | | |
| | | | | | AL037771, T11828, | | | | | |
| | | | | | AI252274, AI732378, | | | | | |
| | | | | | AA559241, | | | | | |
| | | | | | AA503475, | | | | | |
| | | | | | AA527602, | | | | | |
| | | | | | AA531079, | | | | | |
| | | | | | AA493708, C18840, | | | | | |
| | | | | | AA469451, AI133297, | | | | | |
| | | | | | AA828802, | | | | | |
| | | | | | AA828781, | | | | | |
| | | | | | AW021583, | | | | | |
| | | | | | AA640685, AI439910, | | | | | |
| | | | | | AI270117, AA527727, | | | | | |
| | | | | | AW276935, | | | | | |
| | | | | | AW023990, | | | | | |
| | | | | | AI382825, | | | | | |
| | | | | | AL038705, | | | | | |
| | | | | | AI561060, AI282479, | | | | | |
| | | | | | T29611, AA601642, | | | | | |
| | | | | | AA602954, | | | | | |
| | | | | | AA809546, | | | | | |
| | | | | | AA283730, | | | | | |
| | | | | | AL036037, | | | | | |
| | | | | | AI687343, AI434695, | | | | | |
| | | | | | AA477122, AI754955, | | | | | |
| | | | | | AA515905, C18521, | | | | | |
| | | | | | AI9S0671, AA955031, | | | | | |
| | | | | | AW021917, | | | | | |
| | | | | | AA503258, D82454, | | | | | |
| | | | | | AA458703, | | | | | |
| | | | | | AA908285, T07039, | | | | | |
| | | | | | AW022834, | | | | | |
| | | | | | AI933714, AA846935, | | | | | |
| | | | | | AA569471, | | | | | |
| | | | | | AA548058, AI732151, | | | | | |
| | | | | | AA587516, | | | | | |
| | | | | | AA502155, D83989, | | | | | |
| | | | | | AL135744, X54171, | | | | | |
| | | | | | AC008015, | | | | | |
| | | | | | AC002091, | | | | | |
| | | | | | AC004263, | | | | | |
| | | | | | AC005412, X54175, | | | | | |
| | | | | | AC004859, | | | | | |
| | | | | | AC002302, | | | | | |
| | | | | | AC005387, | | | | | |
| | | | | | AL022326, M37551, | | | | | |
| | | | | | AP000512, | | | | | |
| | | | | | AL109798, | | | | | |
| | | | | | AC006509, X55926, | | | | | |
| | | | | | AL035658, | | | | | |
| | | | | | AC004900, U67829, | | | | | |
| | | | | | AC005619, | | | | | |
| | | | | | AC005399, | | | | | |
| | | | | | AC004883, | | | | | |
| | | | | | AC004837, | | | | | |
| | | | | | AC004893, | | | | | |
| | | | | | AC005736, | | | | | |
| | | | | | AC006036, | | | | | |
| | | | | | AC005971, | | | | | |
| | | | | | AL034420, | | | | | |
| | | | | | AL031311, | | | | | |
| | | | | | AC002352, | | | | | |
| | | | | | AC005914, X54178, | | | | | |
| | | | | | AC007395, | | | | | |
| | | | | | AC004231, Z93241, | | | | | |
| | | | | | AP000349, | | | | | |
| | | | | | AC006468, | | | | | |
| | | | | | AC006023, | | | | | |
| | | | | | AC005480, X54181, | | | | | |
| | | | | | AL096763, X55933, | | | | | |
| | | | | | Z84719, U18399, | | | | | |
| | | | | | AL079304, | | | | | |
| | | | | | AL022726, | | | | | |
| | | | | | AC006115, | | | | | |
| | | | | | AC004149, | | | | | |
| | | | | | AC004821, X75335, | | | | | |
| | | | | | AC005296, U18394, | | | | | |
| | | | | | AC004963, | | | | | |
| | | | | | AC006285, | | | | | |
| | | | | | AC005303, | | | | | |
| | | | | | AC007731, | | | | | |
| | | | | | AC005500, | | | | | |
| | | | | | AC004999, | | | | | |
| | | | | | AC000134, U66059, | | | | | |
| | | | | | AL031279, | | | | | |
| | | | | | AL031680, | | | | | |
| | | | | | AC004386, | | | | | |
| | | | | | AL034582, | | | | | |
| | | | | | AC007199, | | | | | |
| | | | | | AC007263, | | | | | |
| | | | | | AC006530, | | | | | |
| | | | | | AC006539, Z84480, | | | | | |
| | | | | | Z83844, U18391, | | | | | |
| | | | | | U18395, Z82173, | | | | | |
| | | | | | U95743, AP000334, | | | | | |
| | | | | | AC007386, | | | | | |
| | | | | | AL096776, | | | | | |
| | | | | | AC004230, | | | | | |
| | | | | | AC005568, | | | | | |
| | | | | | AC005184, | | | | | |
| | | | | | AC004655, | | | | | |
| | | | | | AC005057, | | | | | |
| | | | | | AC005484, | | | | | |
| | | | | | AL022165, AJ239321, | | | | | |
| | | | | | AL031683, U18396, | | | | | |
| | | | | | AC005368, | | | | | |
| | | | | | AC004474, | | | | | |
| | | | | | AC007226, | | | | | |
| | | | | | AC002312, | | | | | |
| | | | | | AL033525, | | | | | |
| | | | | | AC004659, | | | | | |
| | | | | | AC007193, | | | | | |
| | | | | | AL035695, | | | | | |
| | | | | | AC006040, | | | | | |
| | | | | | AC007041, | | | | | |
| | | | | | AL034553, | | | | | |
| | | | | | AC006144, | | | | | |
| | | | | | AC004531, | | | | | |
| | | | | | AL035461, | | | | | |
| | | | | | AC004794, | | | | | |
| | | | | | AC002059, Z82203, | | | | | |
| | | | | | AC006139, X55924, | | | | | |
| | | | | | X55925, AL121588, | | | | | |
| | | | | | AP000514, | | | | | |
| | | | | | AL022313, | | | | | |
| | | | | | AC005772, Z94802, | | | | | |
| | | | | | AL021878, | | | | | |
| | | | | | AL023494, | | | | | |
| | | | | | AF053356, | | | | | |
| | | | | | AL023553, U57005, | | | | | |
| | | | | | U80017, AC002400, | | | | | |
| | | | | | AP000173, Z82178, | | | | | |
| | | | | | AC006556, | | | | | |
| | | | | | AP000275, | | | | | |
| | | | | | AC004019, Z98752, | | | | | |
| | | | | | AL035457, U57007, | | | | | |
| | | | | | AC006552, | | | | | |
| | | | | | AC005944, | | | | | |
| | | | | | AP000105, AP000037, | | | | | |
| | | | | | AC005753, | | | | | |
| | | | | | AC004485, | | | | | |
| | | | | | AC007917, | | | | | |
| | | | | | AC005004, Z79997, | | | | | |
| | | | | | Z81370, AC003982, | | | | | |
| | | | | | AP000172, AP000065, | | | | | |
| | | | | | AF100617, | | | | | |
| | | | | | AC004033, | | | | | |
| | | | | | AF067844, X55923, | | | | | |
| | | | | | AP000057, AP001054, | | | | | |
| | | | | | Z83838, X55929, | | | | | |
| | | | | | AC007631, | | | | | |
| | | | | | AC005291, | | | | | |
| | | | | | AC004972, X54180, | | | | | |
| | | | | | AC005372, | | | | | |
| | | | | | AP000125, | | | | | |
| | | | | | AC004895, | | | | | |
| | | | | | AL109627, | | | | | |
| | | | | | AC005510, | | | | | |
| | | | | | AC002565, | | | | | |
| | | | | | AL133245, | | | | | |
| | | | | | AL023807, | | | | | |
| | | | | | AP000355, | | | | | |
| | | | | | AC002375, | | | | | |
| | | | | | AL049795, U18392, | | | | | |
| | | | | | Z95152, X54179, | | | | | |
| | | | | | AC000353, | | | | | |
| | | | | | AC005243, | | | | | |
| | | | | | AL121603, | | | | | |
| | | | | | AL078611, | | | | | |
| | | | | | AP000557, | | | | | |
| | | | | | AC007371, | | | | | |
| | | | | | AC004841, Z97053, | | | | | |
| | | | | | AL023694, | | | | | |
| | | | | | AC002476, L78833, | | | | | |
| | | | | | AF196779, | | | | | |
| | | | | | AC004388, | | | | | |
| | | | | | AP000031, | | | | | |
| | | | | | AL121655, | | | | | |
| | | | | | AC005225, | | | | | |
| | | | | | AC005544, | | | | | |
| | | | | | AC007842, Z84466, | | | | | |
| | | | | | AB023048, | | | | | |
| | | | | | AC005738, | | | | | |
| | | | | | AC005488, | | | | | |
| | | | | | AL096791, | | | | | |
| | | | | | AC005725, | | | | | |
| | | | | | AP000114, AP000046, | | | | | |
| | | | | | AP000511, | | | | | |
| | | | | | AC003108, L78810, | | | | | |
| | | | | | AL035086, | | | | | |
| | | | | | AC005326, | | | | | |
| | | | | | AC005520, | | | | | |
| | | | | | AL035415, | | | | | |
| | | | | | AC002430, | | | | | |
| | | | | | AC005218, | | | | | |
| | | | | | AC004049, | | | | | |
| | | | | | AC004209, | | | | | |
| | | | | | AC005251, | | | | | |
| | | | | | AL049570, | | | | | |
| | | | | | AB023049, | | | | | |
| | | | | | AC004675, | | | | | |
| | | | | | AC005102, | | | | | |
| | | | | | AC003070, | | | | | |
| | | | | | AL035555, | | | | | |
| | | | | | AC008038, | | | | | |
| | | | | | AC006195, | | | | | |
| | | | | | AC003029, | | | | | |
| | | | | | AC007384, | | | | | |
| | | | | | AP000113, AP000045, | | | | | |
| | | | | | AC002460, Z99128, | | | | | |
| | | | | | U57006, AF165138, | | | | | |
| | | | | | AP000135, | | | | | |
| | | | | | AC005778, | | | | | |
| | | | | | AC005031, | | | | | |
| | | | | | AL078639, | | | | | |
| | | | | | AC006261, | | | | | |
| | | | | | AC002082, | | | | | |
| | | | | | AC005899, and | | | | | |
| | | | | | AF111168. | | | | | |
| HCBMG11 | 233 | 965394 | 1-685 | 15-699 | AI680459, AI022295, | | | | | |
| | | | | | R25336, AI917581, | | | | | |
| | | | | | N76313, and | | | | | |
| | | | | | AA478089. | | | | | |
| HBGDH33 | 234 | 702854 | 1-458 | 15-472 | AI399653, AA453794, | | | | | |
| | | | | | R44976, H06251, | | | | | |
| | | | | | R60067, AI278851, | | | | | |
| | | | | | AA528243, | | | | | |
| | | | | | AA973793, | | | | | |
| | | | | | AA453879, R44717, | | | | | |
| | | | | | and Z40655. | | | | | |
| HBGDF39 | 235 | 861602 | 1-341 | 15-355 | D59582, and D59820. | | | | | |
| HBGDA74 | 236 | 832888 | 1-474 | 15-488 | AI565755, AI342368, | | | | | |
| | | | | | W76561, AA780301, | | | | | |
| | | | | | AI200880, | | | | | |
| | | | | | AW195697, | | | | | |
| | | | | | AA451937, W23209, | | | | | |
| | | | | | AA364898, AI050849, | | | | | |
| | | | | | H39591, AI028147. | | | | | |
| | | | | | AW293972, | | | | | |
| | | | | | AI474504, AA324713, | | | | | |
| | | | | | AI628717, AA961641, | | | | | |
| | | | | | N24530, AF071749, | | | | | |
| | | | | | AF136279, AF071748, | | | | | |
| | | | | | AF132894, AF088886, | | | | | |
| | | | | | AR016587, | | | | | |
| | | | | | AL137742, AJ007331, | | | | | |
| | | | | | and E15813. | | | | | |
| HBGBG69 | 237 | 802090 | 1-43 | 15-57 | | | | | | |
| HBGBG67 | 238 | 588263 | 1-192 | 15-206 | R60478, R11939, | | | | | |
| | | | | | AI140927, | | | | | |
| | | | | | AW166520, | | | | | |
| | | | | | AI097082, AI378818, | | | | | |
| | | | | | AW070736, | | | | | |
| | | | | | AA022937, AI417973, | | | | | |
| | | | | | AI278239, AA813598, | | | | | |
| | | | | | AW024249, | | | | | |
| | | | | | AI143513, R02801, | | | | | |
| | | | | | AW024258, | | | | | |
| | | | | | AI097158, AI217615, | | | | | |
| | | | | | AA128646, AI831140, | | | | | |
| | | | | | AA151765, AI348969, | | | | | |
| | | | | | AW058275, | | | | | |
| | | | | | AI273856, AI537960, | | | | | |
| | | | | | AI310767, AA012905, | | | | | |
| | | | | | AL048340, | | | | | |
| | | | | | AI952433, AI348854, | | | | | |
| | | | | | N22406, AI335235, | | | | | |
| | | | | | N20984, AA808904, | | | | | |
| | | | | | AI860833, R49697, | | | | | |
| | | | | | AI673140, AI810317, | | | | | |
| | | | | | AW075382, | | | | | |
| | | | | | AL047422, | | | | | |
| | | | | | AI288076, AI499104, | | | | | |
| | | | | | AI539690, AI473554, | | | | | |
| | | | | | AL117403, | | | | | |
| | | | | | AF115410, U58996, | | | | | |
| | | | | | U68233, I92592, | | | | | |
| | | | | | AC005902, | | | | | |
| | | | | | AR068751, | | | | | |
| | | | | | AF100781, AF213396, | | | | | |
| | | | | | Y10080, AL117583, | | | | | |
| | | | | | AC004227, | | | | | |
| | | | | | AC006288, | | | | | |
| | | | | | AF013249, | | | | | |
| | | | | | AL133081, | | | | | |
| | | | | | AF026124, AF181849, | | | | | |
| | | | | | AF181850, A15345, | | | | | |
| | | | | | AL080124, | | | | | |
| | | | | | AC005221, | | | | | |
| | | | | | AR066486, A70386, | | | | | |
| | | | | | AF161699, AF082526, | | | | | |
| | | | | | AL049300, I80064, | | | | | |
| | | | | | D4497, I08608, | | | | | |
| | | | | | AF000301, AF137367, | | | | | |
| | | | | | AR023871, | | | | | |
| | | | | | AL050310, X56530, | | | | | |
| | | | | | and AL110222. | | | | | |
| HBGBG52 | 239 | 522424 | 1-245 | 15-259 | T71030, AA747777, | | | | | |
| | | | | | AA381858, | | | | | |
| | | | | | AA668902, | | | | | |
| | | | | | AA558060, | | | | | |
| | | | | | T90248, AA934680, | | | | | |
| | | | | | AA059235, T70174, | | | | | |
| | | | | | AA678436, H86264, | | | | | |
| | | | | | AC006001, | | | | | |
| | | | | | ACOO2350, | | | | | |
| | | | | | AL021546, | | | | | |
| | | | | | AC006449, | | | | | |
| | | | | | AC006026, | | | | | |
| | | | | | AC003102, | | | | | |
| | | | | | AV004895, U18671, | | | | | |
| | | | | | AC005387, | | | | | |
| | | | | | AL133246, | | | | | |
| | | | | | AC022517, | | | | | |
| | | | | | AC005696, | | | | | |
| | | | | | AL021939, | | | | | |
| | | | | | AL035072, | | | | | |
| | | | | | AL035072, | | | | | |
| | | | | | AC005089, | | | | | |
| | | | | | AC005694, | | | | | |
| | | | | | AL050333, | | | | | |
| | | | | | AC005565, | | | | | |
| | | | | | AL121603, | | | | | |
| | | | | | AL135744, | | | | | |
| | | | | | AC005839, | | | | | |
| | | | | | AL008582, | | | | | |
| | | | | | AC006960, U95742, | | | | | |
| | | | | | AC006277, | | | | | |
| | | | | | AC006277, | | | | | |
| | | | | | AC006071, | | | | | |
| | | | | | AL022302, | | | | | |
| | | | | | AC006241, | | | | | |
| | | | | | AL031681, | | | | | |
| | | | | | AC005295, | | | | | |
| | | | | | AC005004, | | | | | |
| | | | | | AC005899, | | | | | |
| | | | | | AC002312, | | | | | |
| | | | | | AC005785, | | | | | |
| | | | | | AL049776, | | | | | |
| | | | | | AC002310, | | | | | |
| | | | | | AC004253, | | | | | |
| | | | | | AC007666, | | | | | |
| | | | | | AC006530, | | | | | |
| | | | | | AC004859, | | | | | |
| | | | | | AC000353, AJ003147, | | | | | |
| | | | | | AC004858, | | | | | |
| | | | | | AC005081, | | | | | |
| | | | | | AC002126, | | | | | |
| | | | | | AF196969, | | | | | |
| | | | | | AC005231, | | | | | |
| | | | | | AC004966, | | | | | |
| | | | | | AL035587, | | | | | |
| | | | | | AF109907, | | | | | |
| | | | | | AC002470, | | | | | |
| | | | | | AC005015, | | | | | |
| | | | | | AP000688, | | | | | |
| | | | | | AC005829, | | | | | |
| | | | | | AC004383, | | | | | |
| | | | | | AC005529, | | | | | |
| | | | | | AC005940, | | | | | |
| | | | | | AC004491, | | | | | |
| | | | | | AL022322, | | | | | |
| | | | | | AC004019, | | | | | |
| | | | | | AC006064, | | | | | |
| | | | | | AC004030, | | | | | |
| | | | | | AC007055, | | | | | |
| | | | | | AL034420, | | | | | |
| | | | | | AC005288, Z83840, | | | | | |
| | | | | | D00591, AC007308, | | | | | |
| | | | | | AL023803, | | | | | |
| | | | | | AC005011, | | | | | |
| | | | | | AL049757, | | | | | |
| | | | | | AC005776, | | | | | |
| | | | | | AC005102, | | | | | |
| | | | | | AC007021, | | | | | |
| | | | | | AL034423, | | | | | |
| | | | | | AP000692, | | | | | |
| | | | | | AL109847, | | | | | |
| | | | | | AF017104, | | | | | |
| | | | | | AP000503, | | | | | |
| | | | | | AC002347, | | | | | |
| | | | | | AL035659, S77605, | | | | | |
| | | | | | Z99716, AP000556, | | | | | |
| | | | | | AL031005, | | | | | |
| | | | | | AC002369, | | | | | |
| | | | | | AL079340, | | | | | |
| | | | | | AC007917, | | | | | |
| | | | | | AL049780, | | | | | |
| | | | | | AC004228, | | | | | |
| | | | | | AC005944, | | | | | |
| | | | | | AC005971, | | | | | |
| | | | | | AC004770, | | | | | |
| | | | | | AC004804, | | | | | |
| | | | | | AC006312, Z98950, | | | | | |
| | | | | | AC002128, | | | | | |
| | | | | | AC005527, | | | | | |
| | | | | | AC002073, U91326, | | | | | |
| | | | | | AC007193, | | | | | |
| | | | | | AC002116, | | | | | |
| | | | | | AL008718, | | | | | |
| | | | | | AC007421, | | | | | |
| | | | | | AC002477, | | | | | |
| | | | | | AC007637, | | | | | |
| | | | | | AF001549, | | | | | |
| | | | | | AC002072, | | | | | |
| | | | | | AF003626, | | | | | |
| | | | | | AC005218, | | | | | |
| | | | | | AL121655, | | | | | |
| | | | | | AC005500, | | | | | |
| | | | | | AL035071, | | | | | |
| | | | | | AC003689, | | | | | |
| | | | | | AC005622, | | | | | |
| | | | | | AL022318, | | | | | |
| | | | | | AL050318, | | | | | |
| | | | | | AB003151, | | | | | |
| | | | | | AL096707, D26535, | | | | | |
| | | | | | AL096701, | | | | | |
| | | | | | AL022323, | | | | | |
| | | | | | AL034350, | | | | | |
| | | | | | AC005535, | | | | | |
| | | | | | AC004876, Z83820, | | | | | |
| | | | | | AC007066, | | | | | |
| | | | | | AC007283, | | | | | |
| | | | | | AP000115, | | | | | |
| | | | | | AL133371, L78810, | | | | | |
| | | | | | AC009516, | | | | | |
| | | | | | and AC002316. | | | | | |
| HBGBG38 | 240 | 525837 | 1-137 | 15-151 | | | | | | |
| HBGBE12 | 241 | 971466 | 1-94 | 15-108 | | | | | | |
| HBGBB78 | 242 | 773930 | 1-329 | 15-343 | H51141, and D37934. | | | | | |
| HBCPV80 | 243 | 932817 | 1-390 | 15-404 | AI306162, AI492835, | | | | | |
| | | | | | AC002359, | | | | | |
| | | | | | and AC002365. | | | | | |
| HBCPO75 | 244 | 927520 | 1-473 | 15-487 | AI017490, AI221329, | | | | | |
| | | | | | AA973064, | | | | | |
| | | | | | AA813611, AI688144, | | | | | |
| | | | | | AI222206, | | | | | |
| | | | | | AW182987, | | | | | |
| | | | | | AA883877, W31185, | | | | | |
| | | | | | AI208514, AI917508, | | | | | |
| | | | | | and AI810095. | | | | | |
| HBCPK03 | 245 | 922493 | 1-720 | 15-734 | AA831288. | | | | | |
| HBCJP02 | 246 | 917981 | 1-494 | 15-508 | AI188098, | | | | | |
| | | | | | AW304309, | | | | | |
| | | | | | AI375434, AI625524, | | | | | |
| | | | | | AI016723, AI167974, | | | | | |
| | | | | | AI302664, | | | | | |
| | | | | | AW001092, | | | | | |
| | | | | | AI246687, AI572643, | | | | | |
| | | | | | AI201622, | | | | | |
| | | | | | AW151711, | | | | | |
| | | | | | AW167729, | | | | | |
| | | | | | AI609516, AI687735, | | | | | |
| | | | | | AI191064, AI289182, | | | | | |
| | | | | | AI191358, AI024836, | | | | | |
| | | | | | AA632308, AI831665, | | | | | |
| | | | | | AI084459, AI088322, | | | | | |
| | | | | | AA242818, | | | | | |
| | | | | | AA580006, AI888580, | | | | | |
| | | | | | AA011305, AI870130, | | | | | |
| | | | | | AW168685, | | | | | |
| | | | | | AA010915, | | | | | |
| | | | | | AW078807, | | | | | |
| | | | | | AI372084, AI217609, | | | | | |
| | | | | | AI200991, | | | | | |
| | | | | | AW237859, | | | | | |
| | | | | | AI263564, AA629134, | | | | | |
| | | | | | AI720347, AA862783, | | | | | |
| | | | | | AI880912, AA564376, | | | | | |
| | | | | | AI879913, AI367291, | | | | | |
| | | | | | N74110, Z21520, | | | | | |
| | | | | | AA028965, AI349340, | | | | | |
| | | | | | AA298576, and | | | | | |
| | | | | | AI582057. | | | | | |
| | | | | | HBCJG07 | 247 | 951898 | 1-375 | 15-389 | R82747, R30969, |
| | | | | | and T87286. | | | | | |
| HACMR08 | 248 | 955638 | 1-485 | 15-499 | AI292236, | | | | | |
| | | | | | AW265393, | | | | | |
| | | | | | AI123080, | | | | | |
| | | | | | AW069769, | | | | | |
| | | | | | AL042373, | | | | | |
| | | | | | AW069227, | | | | | |
| | | | | | AL038936, | | | | | |
| | | | | | AI040051, | | | | | |
| | | | | | AW438542, | | | | | |
| | | | | | AI216990, | | | | | |
| | | | | | AL079734, | | | | | |
| | | | | | AA402129, AI887235, | | | | | |
| | | | | | AI674946, AA501461, | | | | | |
| | | | | | AI733856, AI755214, | | | | | |
| | | | | | AW303196, | | | | | |
| | | | | | AA469327, | | | | | |
| | | | | | AA502532, | | | | | |
| | | | | | AW301350, | | | | | |
| | | | | | AL120343, | | | | | |
| | | | | | AI754105, AA515728, | | | | | |
| | | | | | AI754567, | | | | | |
| | | | | | AW274349, | | | | | |
| | | | | | AI821714, AI792133, | | | | | |
| | | | | | AI791913, | | | | | |
| | | | | | AW265090, | | | | | |
| | | | | | AW270258, | | | | | |
| | | | | | AW088846, | | | | | |
| | | | | | AW021015, | | | | | |
| | | | | | AW237905, | | | | | |
| | | | | | AW072933, | | | | | |
| | | | | | AW302315, | | | | | |
| | | | | | AI354423, | | | | | |
| | | | | | AW103509, | | | | | |
| | | | | | AW341903, | | | | | |
| | | | | | AI859946, AI821785, | | | | | |
| | | | | | AA653139, | | | | | |
| | | | | | AW270270, | | | | | |
| | | | | | AL040054, | | | | | |
| | | | | | AA613627, AI696962, | | | | | |
| | | | | | AI357823, | | | | | |
| | | | | | AL042856, | | | | | |
| | | | | | AW407578, | | | | | |
| | | | | | AA602906, AI801482, | | | | | |
| | | | | | AI267356, | | | | | |
| | | | | | AW270619, T67090, | | | | | |
| | | | | | AI753488, AI281881, | | | | | |
| | | | | | AA582554, | | | | | |
| | | | | | AW021917, | | | | | |
| | | | | | AA634837, | | | | | |
| | | | | | AA715814, AI267450, | | | | | |
| | | | | | AI874341, AA704393, | | | | | |
| | | | | | AL045709, T74524, | | | | | |
| | | | | | AA644090, AI754037, | | | | | |
| | | | | | AA584489, AI969436, | | | | | |
| | | | | | AA631507, AI282253, | | | | | |
| | | | | | AI054333, | | | | | |
| | | | | | AW410354, | | | | | |
| | | | | | AW277174, | | | | | |
| | | | | | AA470344, | | | | | |
| | | | | | AA533025, | | | | | |
| | | | | | AW117740, | | | | | |
| | | | | | AL044858, | | | | | |
| | | | | | AA284247, | | | | | |
| | | | | | AA595499, AI473943, | | | | | |
| | | | | | AI278089, | | | | | |
| | | | | | AW302711, | | | | | |
| | | | | | AW270768, | | | | | |
| | | | | | AA764783, AI889440, | | | | | |
| | | | | | AI275982, AI687343, | | | | | |
| | | | | | AI051147, | | | | | |
| | | | | | AL042756, | | | | | |
| | | | | | AI368256, | | | | | |
| | | | | | AW190505, | | | | | |
| | | | | | AI291037, | | | | | |
| | | | | | AW327624, H07953, | | | | | |
| | | | | | AI244127, | | | | | |
| | | | | | AW263864, | | | | | |
| | | | | | AI371249, AA525253, | | | | | |
| | | | | | AA613624, | | | | | |
| | | | | | AW438539, | | | | | |
| | | | | | AI792499, AI017251, | | | | | |
| | | | | | AA833875, | | | | | |
| | | | | | AA833896, | | | | | |
| | | | | | AAI92278, AI144081, | | | | | |
| | | | | | AI380617, AI369580, | | | | | |
| | | | | | AL079645, | | | | | |
| | | | | | AI291823, AA430137, | | | | | |
| | | | | | AI110844, AA634786, | | | | | |
| | | | | | AW020992, | | | | | |
| | | | | | AI064864, | | | | | |
| | | | | | AW021951, | | | | | |
| | | | | | AA307598, | | | | | |
| | | | | | AW021154, | | | | | |
| | | | | | AI917132, AA622801, | | | | | |
| | | | | | H73561, AI872216, | | | | | |
| | | | | | AL109758, | | | | | |
| | | | | | AC002301, | | | | | |
| | | | | | AC006077, Z68276, | | | | | |
| | | | | | AC005089, | | | | | |
| | | | | | AL049872, | | | | | |
| | | | | | AC006441, Z82182, | | | | | |
| | | | | | AC002306, | | | | | |
| | | | | | AC007204, | | | | | |
| | | | | | AF205588, | | | | | |
| | | | | | AP000251, | | | | | |
| | | | | | AC005399, | | | | | |
| | | | | | AC006262, | | | | | |
| | | | | | AP000212, AP000134, | | | | | |
| | | | | | AP000030, | | | | | |
| | | | | | AC007371, | | | | | |
| | | | | | AC002430, | | | | | |
| | | | | | AC005808, | | | | | |
| | | | | | AC007384, | | | | | |
| | | | | | AC004859, | | | | | |
| | | | | | AC006006, | | | | | |
| | | | | | AC005632, | | | | | |
| | | | | | AP000356, | | | | | |
| | | | | | AL022721, | | | | | |
| | | | | | AC004257, | | | | | |
| | | | | | AC005037, | | | | | |
| | | | | | AF053356, | | | | | |
| | | | | | AL034417, | | | | | |
| | | | | | AC005696, | | | | | |
| | | | | | AC002119, | | | | | |
| | | | | | AC005261, | | | | | |
| | | | | | AL034420, | | | | | |
| | | | | | AF196779, | | | | | |
| | | | | | AC004815, | | | | | |
| | | | | | AC004797, | | | | | |
| | | | | | AF111167, | | | | | |
| | | | | | AC004878, Z85986, | | | | | |
| | | | | | AC005377, | | | | | |
| | | | | | AC004253, | | | | | |
| | | | | | AC002477, | | | | | |
| | | | | | AC005901, | | | | | |
| | | | | | AC005519, | | | | | |
| | | | | | AC004655, | | | | | |
| | | | | | AC002492, | | | | | |
| | | | | | AL031433, | | | | | |
| | | | | | AL035458, | | | | | |
| | | | | | AC006317, | | | | | |
| | | | | | AC006966, | | | | | |
| | | | | | AC004921, | | | | | |
| | | | | | AC004895, | | | | | |
| | | | | | AC004477, | | | | | |
| | | | | | AL022476, | | | | | |
| | | | | | AL133448, | | | | | |
| | | | | | AC004858, | | | | | |
| | | | | | AC005682, | | | | | |
| | | | | | AB023049, | | | | | |
| | | | | | AC005060, | | | | | |
| | | | | | AC000113, | | | | | |
| | | | | | AC005179, | | | | | |
| | | | | | AF196972, | | | | | |
| | | | | | AC005666, | | | | | |
| | | | | | AC008372, | | | | | |
| | | | | | AC007055, | | | | | |
| | | | | | AL135744, | | | | | |
| | | | | | AP000065, | | | | | |
| | | | | | AC004967, | | | | | |
| | | | | | AL024509, | | | | | |
| | | | | | AC007216, | | | | | |
| | | | | | AC015853, | | | | | |
| | | | | | AC002425, | | | | | |
| | | | | | AF109907, | | | | | |
| | | | | | AL034429, | | | | | |
| | | | | | AC002544, | | | | | |
| | | | | | AL121658, | | | | | |
| | | | | | AC007684, | | | | | |
| | | | | | AC007842, | | | | | |
| | | | | | AC002347, | | | | | |
| | | | | | AC004106, | | | | | |
| | | | | | AC007227, | | | | | |
| | | | | | AC006487, | | | | | |
| | | | | | AC005332, | | | | | |
| | | | | | AC005251, | | | | | |
| | | | | | AL031228, | | | | | |
| | | | | | AC007226, | | | | | |
| | | | | | AC007686, | | | | | |
| | | | | | AL136504, | | | | | |
| | | | | | AF031078, | | | | | |
| | | | | | AC004972, | | | | | |
| | | | | | AL079340, | | | | | |
| | | | | | AC006430, | | | | | |
| | | | | | AL033527, | | | | | |
| | | | | | AC005701, | | | | | |
| | | | | | AF015262, | | | | | |
| | | | | | AF165142, | | | | | |
| | | | | | AL050307, | | | | | |
| | | | | | AC005694, | | | | | |
| | | | | | AL035410, U85195, | | | | | |
| | | | | | AL008627, | | | | | |
| | | | | | AF030876, | | | | | |
| | | | | | AC005200, | | | | | |
| | | | | | AJ229043, | | | | | |
| | | | | | AC002039, | | | | | |
| | | | | | AC005829, | | | | | |
| | | | | | AC004098, | | | | | |
| | | | | | AC009247, Z98200, | | | | | |
| | | | | | AC004686, | | | | | |
| | | | | | AL139054, | | | | | |
| | | | | | AC004128, | | | | | |
| | | | | | AL021918, | | | | | |
| | | | | | AC004099, | | | | | |
| | | | | | AC003101, | | | | | |
| | | | | | AC004552, | | | | | |
| | | | | | AC005599, | | | | | |
| | | | | | AE000658, | | | | | |
| | | | | | AF042090, Z84467, | | | | | |
| | | | | | AC003093, | | | | | |
| | | | | | AC004448, | | | | | |
| | | | | | AC007073, | | | | | |
| | | | | | AL033525, | | | | | |
| | | | | | AC005255, | | | | | |
| | | | | | AC004890, | | | | | |
| | | | | | AC005324, | | | | | |
| | | | | | AC005578, | | | | | |
| | | | | | AL031005, | | | | | |
| | | | | | AC007225, | | | | | |
| | | | | | AF111168, | | | | | |
| | | | | | AC005726, | | | | | |
| | | | | | AC005821, | | | | | |
| | | | | | AL035587, | | | | | |
| | | | | | AC005207, | | | | | |
| | | | | | AC004408, | | | | | |
| | | | | | AL022327, | | | | | |
| | | | | | AC005529, U95742 | | | | | |
| | | | | | AC006026, | | | | | |
| | | | | | AC004236, | | | | | |
| | | | | | AC004150, | | | | | |
| | | | | | AC005736, | | | | | |
| | | | | | AC007052, | | | | | |
| | | | | | AF134726, | | | | | |
| | | | | | AC000353, | | | | | |
| | | | | | AC003108, | | | | | |
| | | | | | AF088219, | | | | | |
| | | | | | AL022320, | | | | | |
| | | | | | AF129756, Z82244, | | | | | |
| | | | | | AP000215, | | | | | |
| | | | | | AC004263, | | | | | |
| | | | | | AC016831, | | | | | |
| | | | | | AC008115, | | | | | |
| | | | | | AF146191, | | | | | |
| | | | | | AC004659, | | | | | |
| | | | | | AL021393, | | | | | |
| | | | | | AC005899, | | | | | |
| | | | | | AC002365, | | | | | |
| | | | | | AF001549, | | | | | |
| | | | | | AC006101, | | | | | |
| | | | | | AL021546, | | | | | |
| | | | | | AL117344, Z97056, | | | | | |
| | | | | | AL133246, | | | | | |
| | | | | | AL034548, Y18000, | | | | | |
| | | | | | AC003992, | | | | | |
| | | | | | AC004707, | | | | | |
| | | | | | AF017104, | | | | | |
| | | | | | AD000092, | | | | | |
| | | | | | AC007899, | | | | | |
| | | | | | AC012627, | | | | | |
| | | | | | AC005905, | | | | | |
| | | | | | AC004590, | | | | | |
| | | | | | AP000505, | | | | | |
| | | | | | AC005874, | | | | | |
| | | | | | AF134471, | | | | | |
| | | | | | AC004796, | | | | | |
| | | | | | AL031117, | | | | | |
| | | | | | AL109627, | | | | | |
| | | | | | AL049643, | | | | | |
| | | | | | AL049748, | | | | | |
| | | | | | AC005972, | | | | | |
| | | | | | AL049873, | | | | | |
| | | | | | AP000252, | | | | | |
| | | | | | AL133500, | | | | | |
| | | | | | AC004913, | | | | | |
| | | | | | AL034555, | | | | | |
| | | | | | AC006120, D87675, | | | | | |
| | | | | | AL135960, AJ131016, | | | | | |
| | | | | | AC007277, | | | | | |
| | | | | | AC005378, | | | | | |
| | | | | | AC005071, | | | | | |
| | | | | | AC003070, | | | | | |
| | | | | | AC004841, | | | | | |
| | | | | | AC004622, Z97352, | | | | | |
| | | | | | AC002350, | | | | | |
| | | | | | AC006254, | | | | | |
| | | | | | AC006511, Z98742, | | | | | |
| | | | | | AL031276, | | | | | |
| | | | | | AC003110, D63507, | | | | | |
| | | | | | AL096701, | | | | | |
| | | | | | AC005216, | | | | | |
| | | | | | AC004475, | | | | | |
| | | | | | AP000349, Z70288, | | | | | |
| | | | | | AL031286, | | | | | |
| | | | | | AC005409, | | | | | |
| | | | | | AC002073, Y10196, | | | | | |
| | | | | | AC005520, | | | | | |
| | | | | | AC005057, | | | | | |
| | | | | | AF064861, | | | | | |
| | | | | | AL049843, | | | | | |
| | | | | | AC005102, | | | | | |
| | | | | | AC004812, | | | | | |
| | | | | | AC002418, | | | | | |
| | | | | | AC005295, | | | | | |
| | | | | | AC002553, | | | | | |
| | | | | | AL110502, | | | | | |
| | | | | | AF190465, | | | | | |
| | | | | | AL121603, | | | | | |
| | | | | | AC000385, | | | | | |
| | | | | | AC007546, | | | | | |
| | | | | | AL022162, | | | | | |
| | | | | | AC005730, | | | | | |
| | | | | | AC005484, | | | | | |
| | | | | | AC004887, | | | | | |
| | | | | | AC004000, | | | | | |
| | | | | | AL122023, | | | | | |
| | | | | | AC005280, | | | | | |
| | | | | | AC003043, | | | | | |
| | | | | | AC002504, | | | | | |
| | | | | | AL031295, | | | | | |
| | | | | | AC007537, Z68269, | | | | | |
| | | | | | AF015148, | | | | | |
| | | | | | AC008044, | | | | | |
| | | | | | AB026898, | | | | | |
| | | | | | AL109628, | | | | | |
| | | | | | and AI420248. | | | | | |

[0093] TABLE 4

| Code | Description | Tissue | Organ | Cell Line | Disease | Vector |
|---|---|---|---|---|---|---|
| AR022 | a Heart | a Heart | | | | |
| AR023 | a Liver | a Liver | | | | |
| AR024 | a mammary gland | a mammary gland | | | | |
| AR025 | a Prostate | a Prostate | | | | |
| AR026 | a small intestine | a small intestine | | | | |
| AR027 | a Stomach | a Stomach | | | | |
| AR028 | Blood B cells | Blood B cells | | | | |
| AR029 | Blood B cells | Blood B cells | | | | |
| | activated | activated | | | | |
| AR030 | Blood B cells | Blood B cells | | | | |
| | resting | resting | | | | |
| AR031 | Blood T cells | Blood T cells | | | | |
| | activated | activated | | | | |
| AR032 | Blood T cells resting | Blood T cells resting | | | | |
| AR033 | brain | brain | | | | |
| AR034 | breast | breast | | | | |
| AR035 | breast cancer | breast cancer | | | | |
| AR036 | Cell Line CAOV3 | Cell Line CAOV3 | | | | |
| AR037 | cell line PA-1 | cell line PA-1 | | | | |
| AR038 | cell line transformed | cell line transformed | | | | |
| AR039 | colon | colon | | | | |
| AR040 | colon (9808co65R) | colon (9808co65R) | | | | |
| AR041 | colon (9809co15) | colon (9809co15) | | | | |
| AR042 | colon cancer | colon cancer | | | | |
| AR043 | colon cancer | colon cancer | | | | |
| | (9808co64R) | (9808co64R) | | | | |
| AR044 | colon cancer | colon cancer | | | | |
| | 9809co14 | 9809co14 | | | | |
| AR045 | corn clone 5 | corn clone 5 | | | | |
| AR046 | corn clone 6 | corn clone 6 | | | | |
| AR047 | corn clone 2 | corn clone 2 | | | | |
| AR048 | corn clone3 | corn clone3 | | | | |
| AR049 | Corn Clone4 | Corn Clone4 | | | | |
| AR050 | Donor II B Cells | Donor II B Cells | | | | |
| | 24 hrs | 24 hrs | | | | |
| AR051 | Donor II B Cells | Donor II B Cells | | | | |
| | 72 hrs | 72 hrs | | | | |
| AR052 | Donor II B-Cells | Donor II B-Cells | | | | |
| | 24 hrs. | 24 hrs. | | | | |
| AR053 | Donor II B-Cells | Donor II B-Cells | | | | |
| | 72 hrs | 72 hrs | | | | |
| AR054 | Donor II Resting B | Donor II Resting B | | | | |
| | Cells | Cells | | | | |
| AR055 | Heart | Heart | | | | |
| AR056 | Human Lung | Human Lung | | | | |
| | (clonetech) | (clonetech) | | | | |
| AR057 | Human Mammary | Human Mammary | | | | |
| | (clontech) | (clontech) | | | | |
| AR058 | Human Thymus | Human Thymus | | | | |
| | (clonetech) | (clonetech) | | | | |
| AR059 | Jurkat (unstimulated) | Jurkat | | | | |
| | | (unstimulated) | | | | |
| AR060 | Kidney | Kidney | | | | |
| AR061 | Liver | Liver | | | | |
| AR062 | Liver (Clontech) | Liver (Clontech) | | | | |
| AR063 | Lymphocytes chronic | Lymphocytes | | | | |
| | lymphocytic | chronic lymphocytic | | | | |
| | leukaemia | leukaemia | | | | |
| AR064 | Lymphocytes diffuse | Lymphocytes | | | | |
| | large B cell | diffuse large B cell | | | | |
| | lymphoma | lymphoma | | | | |
| AR065 | Lymphocytes | Lymphocytes | | | | |
| | follicular lymphoma | follicular lymphoma | | | | |
| AR066 | normal breast | normal breast | | | | |
| AR067 | Normal Ovarian | Normal Ovanan | | | | |
| | (4004901) | (4004901) | | | | |
| AR068 | Normal Ovary | Normal Ovary | | | | |
| | 9508G045 | 9508G045 | | | | |
| AR069 | Normal Ovary | Normal Ovary | | | | |
| | 9701G208 | 9701G208 | | | | |
| AR070 | Normal Ovary | Normal Ovary | | | | |
| | 9806G005 | 9806G005 | | | | |
| AR071 | Ovarian Cancer | Ovarian Cancer | | | | |
| AR072 | Ovarian Cancer | Ovarian Cancer | | | | |
| | (9702G001) | (9702G001) | | | | |
| AR073 | Ovarian Cancer | Ovarian Cancer | | | | |
| | (9707G029) | (9707G029) | | | | |
| AR074 | Ovarian Cancer | Ovarian Cancer | | | | |
| | (9804G011) | (9804G011) | | | | |
| AR075 | Ovarian Cancer | Ovarian Cancer | | | | |
| | (9806G019) | (9806G019) | | | | |
| AR076 | Ovarian Cancer | Ovarian Cancer | | | | |
| | (9807G017) | (98070017) | | | | |
| AR077 | Ovarian Cancer | Ovarian Cancer | | | | |
| | (9809G001) | (9809G001) | | | | |
| AR078 | ovarian cancer | ovarian cancer | | | | |
| | 15799 | 15799 | | | | |
| AR079 | Ovarian Cancer | Ovarian Cancer | | | | |
| | 17717AID | 17717AID | | | | |
| AR080 | Ovarian Cancer | Ovarian Cancer | | | | |
| | 4004664B1 | 4004664B1 | | | | |
| AR081 | Ovarian Cancer | Ovarian Cancer | | | | |
| | 4005315A1 | 4005315A1 | | | | |
| AR082 | ovarian cancer | ovarian cancer | | | | |
| | 94127303 | 94127303 | | | | |
| AR083 | Ovarian Cancer | Ovarian Cancer | | | | |
| | 96069304 | 96069304 | | | | |
| AR084 | Ovarian Cancer | Ovarian Cancer | | | | |
| | 9707G029 | 9707G029 | | | | |
| AR085 | Ovarian Cancer | Ovarian Cancer | | | | |
| | 9807G045 | 9807G045 | | | | |
| AR086 | ovarian cancer | ovarian cancer | | | | |
| | 9809G001 | 9809G001 | | | | |
| AR087 | Ovarian Cancer | Ovarian Cancer | | | | |
| | 9905C032RC | 9905C032RC | | | | |
| AR088 | Ovarian cancer 9907 | Ovarian cancer 9907 | | | | |
| | C00 3rd | C00 3rd | | | | |
| AR089 | Prostate | Prostate | | | | |
| AR090 | Prostate (clonetech) | Prostate (clonetech) | | | | |
| AR091 | prostate cancer | prostate cancer | | | | |
| AR092 | prostate cancer | prostate cancer | | | | |
| | #15176 | #15176 | | | | |
| AR093 | prostate cancer | prostate cancer | | | | |
| | #15509 | #15509 | | | | |
| AR094 | prostate cancer | prostate cancer | | | | |
| | #15673 | #15673 | | | | |
| AR095 | Small Intestine | Small Intestine | | | | |
| | (Clontech) | (Clontech) | | | | |
| AR096 | Spleen | Spleen | | | | |
| AR097 | Thymus T cells | Thymus T cells | | | | |
| | activated | activated | | | | |
| AR098 | Thymus T cells | Thymus T cells | | | | |
| | resting | resting | | | | |
| AR099 | Tonsil | Tonsil | | | | |
| AR100 | Tonsil geminal center | Tonsil geminal | | | | |
| | centroblast | center centroblast | | | | |
| AR101 | Tonsil germinal | Tonsil germinal | | | | |
| | center B cell | center B cell | | | | |
| AR102 | Tonsil lymph node | Tonsil lymph node | | | | |
| AR103 | Tonsil memory B | Tonsil memory B | | | | |
| | cell | cell | | | | |
| AR104 | Whole Brain | Whole Brain | | | | |
| AR105 | Xenograft ES-2 | Xenograft ES-2 | | | | |
| AR106 | Xenograft SW626 | Xenograft SW626 | | | | |
| H0009 | Human Fetal Brain | | | | | Uni-ZAP |
| | | | | | | XR |
| H0012 | Human Fetal Kidney | Human Fetal Kidney | Kidney | | | Uni-ZAP |
| | | | | | | XR |
| H0087 | Human Thymus | Human Thymus | | | | pBluescript |
| H0178 | Human Fetal Brain | Human Fetal Brain | Brain | | | Uni-ZAP |
| | | | | | | XR |
| H0181 | Human Primary | Human Primary | Breast | | disease | Uni-ZAP |
| | Breast Cancer | Breast Cancer | | | | XR |
| H0341 | Bone Marrow Cell | Bone Marrow Cell | Bone | Cell Line | | Uni-ZAP |
| | Line (RS4; 11) | Line RS4; 11 | Marrow | | | XR |
| H0520 | NTERA2 + retinoic | NTERA2, | | | | pSport1 |
| | acid, 14 days | Teratocarcinoma | | | | |
| | | cell line | | | | |
| H0560 | KMH2 | KMH2 | | | | pCMVSport 3.0 |
| H0615 | Human Ovarian | Ovarian Cancer | Ovary | | disease | Uni-ZAP |
| | Cancer Reexcision | | | | | XR |
| H0648 | Ovary, Cancer: | Papillary Cstic | | | disease | pSport1 |
| | (4004562 B6) | neoplasm of low | | | | |
| | Papillary Serous | malignant potentia | | | | |
| | Cystic Neoplasm, | | | | | |
| | Low Malignant Pot | | | | | |
| H0650 | B-Cells | B-Cells | | | | pCMVSport 3.0 |
| H0658 | Ovary, Cancer | 9809C332- Poorly | Ovary & | | disease | pSport1 |
| | (9809C332): Poorly | differentiate | Fallopian | | | |
| | differentiated | | Tubes | | | |
| | adenocarcinoma | | | | | |
| H0659 | Ovary, Cancer | Grade II Papillary | Ovary | | disease | pSport1 |
| | (15395A1F): Grade | Carcinoma, Ovary | | | | |
| | II Papillary | | | | | |
| | Carcinoma | | | | | |
| H0660 | Ovary, Cancer: | Poorly differentiated | | | disease | pSport1 |
| | (15799A1F) Poorly | carcinoma, ovary | | | | |
| | differentiated | | | | | |
| | carcinoma | | | | | |
| H0661 | Breast, Cancer: | Breast cancer | | | disease | pSport1 |
| | (4004943 A5) | | | | | |
| H0663 | Breast, Cancer: | Breast Cancer - | Breast | | disease | pSport1 |
| | (4005522 A2) | #4005522(A2) | | | | |
| H0664 | Breast, Cancer: | Breast Cancer | Breast | | disease | pSport1 |
| | (9806C012R) | | | | | |
| H0666 | Ovary, Cancer: | Ovarian Cancer, | | | disease | pSport1 |
| | (4004332 A2) | Sample | | | | |
| | | #4004332A2 | | | | |
| H0670 | Ovary, | Ovarian Cancer - | | | | pSport1 |
| | Cancer(4004650 A3): | 4004650A3 | | | | |
| | Well-Differentiated | | | | | |
| | Micropapillary Serous | | | | | |
| | Carcinoma | | | | | |
| H0672 | Ovary, Cancer: | Ovarian | Ovary | | | pSport1 |
| | (4004576 A8) | Cancer(4004576A8) | | | | |
| H0676 | Colon, Cancer: | Colon Cancer | | | | pCMVSport 3.0 |
| | (9808C064R)-total | 9808C064R | | | | |
| | RNA | | | | | |
| H0682 | Serous Papillary | serous papillary | | | | pCMVSport 3.0 |
| | Adenocarcinoma | adenocarcinoma | | | | |
| | | (9606G304SPA3B) | | | | |
| H0683 | Ovarian Serous | Serous papillary | | | | pCMVSport 3.0 |
| | Papillary | adenocarcinoma, | | | | |
| | Adenocarcinoma | stage 3C (9804G01 | | | | |
| H0684 | Serous Papillary | Ovarian Cancer- | Ovaries | | | pCMVSport 3.0 |
| | Adenocarcinoma | 9810G606 | | | | |
| H0685 | Adenocarcinoma of | Adenocarcinoma of | | | | pCMVSport 3.0 |
| | Ovary, Human Cell | Ovary, Human Cell | | | | |
| | Line, # OVCAR-3 | Line, # OVCAR- | | | | |
| H0686 | Adenocarcinoma of | Adenocarcinoma of | | | | pCMVSport 3.0 |
| | Ovary, Human Cell | Ovary, Human Cell | | | | |
| | Line | Line, # SW-626 | | | | |
| H0688 | Human Ovarian | Human Ovarian | | | | pCMVSport 3.0 |
| | Cancer(#9807G017) | cancer(#9807G017), | | | | |
| | | mRNA from | | | | |
| | | Maura Ru | | | | |
| H0689 | Ovarian Cancer | Ovarian Cancer, | | | | pCMVSport 3.0 |
| | | #9806G019 | | | | |
| N0006 | Human Fetal Brain | Human Fetal Brain | | | | |
| S0150 | LNCAP prostate cell | LNCAP Cell Line | Prostate | Cell Line | | Uni-ZAP |
| | line | | | | | XR |
| S0358 | Colon Normal III | Colon Normal | Colon | | | pSport1 |
| S0374 | Normal colon | Normal colon | | | | pSport1 |
| S0442 | Colon Normal | Colon Normal | | | | pSport1 |
| L0021 | Human adult | | | | | |
| | (K.Okubo) | | | | | |
| L0060 | Human thymus NSTH | | | | | |
| | II | | | | | |
| L0352 | Normalized infant | | | | | BA, M13- |
| | brain, Bento Soares | | | | | derived |
| L0362 | Stratagene ovarian | | | | | Bluescript |
| | cancer (#937219) | | | | | SK- |
| L0365 | NCI_CGAP_Phe1 | pheochromocytoma | | | | Bluescript |
| | | | | | | SK- |
| L0366 | Stratagene schizo | schizophrenic brain | | | | Bluescript |
| | brain S11 | S-11 frontal lobe | | | | SK- |
| L0367 | NCI_CGAP_Sch1 | Schwannoma tumor | | | | Bluescript |
| | | | | | | SK- |
| L0369 | NCI_CGAP_AA1 | adrenal adenoma | adrenal | | | Bluescript |
| | | | gland | | | SK- |
| L0372 | NCI_CGAP_Co12 | colon tumor | colon | | | Bluescript |
| | | | | | | SK- |
| L0374 | NCI_CGAP_Co2 | tumor | colon | | | Bluescript |
| | | | | | | SK- |
| L0376 | NCI_CGAP_Lar1 | larynx | larynx | | | Bluescript |
| | | | | | | SK- |
| L0378 | NCI_CGAP_Lu1 | lung tumor | lung | | | Bluescript |
| | | | | | | SK- |
| L0435 | Infant brain, LLNL | | | | | lafmid BA |
| | array of Dr M. Soares | | | | | |
| | 1NIB | | | | | |
| L0438 | normalized infant | total brain | brain | | | lafmid BA |
| | brain cDNA | | | | | |
| L0439 | Soares infant brain | | whole | | | Lafmid BA |
| | 1NIB | | brain | | | |
| L0462 | WATM1 | | | | | lambda |
| | | | | | | gt11 |
| L0471 | Human fetal heart, | | | | | Lambda |
| | Lambda ZAP Express | | | | | ZAP |
| | | | | | | Express |
| L0509 | NCI_CGAP_Lu26 | invasive | lung | | | pAMP1 |
| | | adenocarcinoma | | | | |
| L0512 | NCI_CGAP_Ov36 | borderline ovarian | ovary | | | pAMP1 |
| | | carcinoma | | | | |
| L0513 | NCI_CGAP_Ov37 | early stage papillary | ovary | | | pAMP1 |
| | | serous carcinoma | | | | |
| L0517 | NCI_CGAP_Pr1 | | | | | pAMP10 |
| L0518 | NCI_CGAP_Pr2 | | | | | pAMP10 |
| L0519 | NCI_CGAP_Pr3 | | | | | pAMP10 |
| L0520 | NCI_CGAP_Alv1 | alveolar | | | | pAMP10 |
| | | rhabdomyosarcoma | | | | |
| L0523 | NCI_CGAP_Lip2 | liposarcoma | | | | pAMP10 |
| L0534 | Chromosome 7 Fetal | brain | brain | | | pAMP10 |
| | Brain cDNA Library | | | | | |
| L0558 | NCI_CGAP_Ov40 | endometrioid | ovary | | | pAMP10 |
| | | ovarian metastasis | | | | |
| L0589 | Stratagene fetal retina | | | | | pBluescript |
| | 937202 | | | | | SK- |
| L0591 | Stratagene HeLa cell. | | | | | pBluescript |
| | s3 937216 | | | | | SK- |
| L0592 | Stratagene hNT | | | | | pBluescript |
| | neuron (#937233) | | | | | SK- |
| L0596 | Stratagene colon | | colon | | | pBluescript |
| | (#937204) | | | | | SK- |
| L0602 | Pancreatic Islet | pancreatic islet | pancreas | | | pBluescript |
| | | | | | | SK- |
| L0603 | Stratagene placenta | | placenta | | | pBluescript |
| | (#937225) | | | | | SK- |
| L0604 | Stratagene muscle | muscle | skeletal | | | pBluescript |
| | 937209 | | muscle | | | SK- |
| L0605 | Stratagene fetal | fetal spleen | spleen | | | pBluescript |
| | spleen (#937205) | | | | | SK- |
| L0623 | HM3 | pectoral muscle | | | | pcDNAII |
| | | (after mastectomy) | | | | (Invitrogen) |
| L0626 | NCI_CGAP_GC1 | bulk germ cell | | | | pCMV- |
| | | seminoma | | | | SPORT2 |
| L0635 | NCI_CGAP_PNS1 | dorsal root ganglion | peripheral | | | pCMV- |
| | | | nervous | | | SPORT4 |
| | | | system | | | |
| L0647 | NCI_CGAP_Sar4 | five pooled | connective | | | pCMV- |
| | | sarcomas, including | tissue | | | SPORT6 |
| | | myxoid liposarcoma | | | | |
| L0655 | NCI_CGAP_Lym12 | lymphoma, | lymph | | | pCMV- |
| | | follicular mixed | node | | | SPORT6 |
| | | small and large cell | | | | |
| L0657 | NCI_CGAP_Ov23 | tumor, 5 pooled (see | ovary | | | pCMV- |
| | | description) | | | | SPORT6 |
| L0659 | NCI_CGAP_Pan1 | adenocarcinoma | pancreas | | | pCMV- |
| | | | | | | SPORT6 |
| L0663 | NCI_CGAP_Ut2 | moderately- | uterus | | | pCMV- |
| | | differentiated | | | | SPORT6 |
| | | endometrial | | | | |
| | | adenocarcino | | | | |
| L0664 | NCI_CGAP_Ut3 | poorly-differentiated | uterus | | | pCMV- |
| | | endometrial | | | | SPORT6 |
| | | adenocarcinoma, | | | | |
| L0665 | NCI_CGAP_Ut4 | serous papillary | uterus | | | pCMV- |
| | | carcinoma, high | | | | SPORT6 |
| | | grade, 2 pooled t | | | | |
| L0666 | NCI_CGAP_Ut1 | well-differentiated | uterus | | | pCMV- |
| | | endometrial | | | | SPORT6 |
| | | adenocarcinoma, 7 | | | | |
| L0717 | Gessler Wilms tumor | | | | | pSPORT1 |
| L0731 | Soares_pregnant_{—} | | uterus | | | pT7T3-Pac |
| | uterus_NbHPU | | | | | |
| L0740 | Soares melanocyte | melanocyte | | | | pT7T3D |
| | 2NbHM | | | | | (Pharmacia) |
| | | | | | | with a |
| | | | | | | modified |
| | | | | | | polylinker |
| L0741 | Soares adult brain | | brain | | | pT7T3D |
| | N2b4HB55Y | | | | | (Pharmacia) |
| | | | | | | with a |
| | | | | | | modified |
| | | | | | | polylinker |
| L0747 | Soares_fetal_heart_N | | heart | | | pT7T3D |
| | bHH19W | | | | | (Pharmacia) |
| | | | | | | with a |
| | | | | | | modified |
| | | | | | | polylinker |
| L0748 | Soares fetal liver | | Liver and | | | pT7T3D |
| | spleen 1NFLS | | Spleen | | | (Pharmacia) |
| | | | | | | with a |
| | | | | | | modified |
| | | | | | | polylinker |
| L0749 | Soares_fetal_liver_ | | Liver and | | | pT7T3D |
| | spleen_1NFLS_S1 | | Spleen | | | (Pharmacia) |
| | | | | | | with a |
| | | | | | | modified |
| | | | | | | polylinker |
| L0750 | Soares_fetal_lung_Nb | | lung | | | pT7T3D |
| | HL19W | | | | | (Pharmacia) |
| | | | | | | with a |
| | | | | | | modified |
| | | | | | | polylinker |
| L0751 | Soares ovary tumor | ovarian tumor | ovary | | | pT7T3D |
| | NbHOT | | | | | (Pharmacia) |
| | | | | | | with a |
| | | | | | | modified |
| | | | | | | polylinker |
| L0752 | Soares_parathyroid_{—} | parathyroid tumor | parathyroid | | | pT7T3D |
| | tumor_NbHPA | | gland | | | (Pharmacia) |
| | | | | | | with a |
| | | | | | | modified |
| | | | | | | polylinker |
| L0753 | Soares_pineal_gland_{—} | | pineal | | | pT7T3D |
| | N3HPG | | gland | | | (Pharmacia) |
| | | | | | | with a |
| | | | | | | modified |
| | | | | | | polylinker |
| L0754 | Soares placenta | | placenta | | | pT7T3D |
| | Nb2HP | | | | | (Pharmacia) |
| | | | | | | with a |
| | | | | | | modified |
| | | | | | | polylinker |
| L0755 | Soares_placenta_8to9 | | placenta | | | pT7T3D |
| | weeks_2NbHP8to9W | | | | | (Pharmacia) |
| | | | | | | with a |
| | | | | | | modified |
| | | | | | | polylinker |
| L0756 | Soares_multiple_{—} | multiple sclerosis | | | | pT7T3D |
| | sclerosis_2NbHMSP | lesions | | | | (Pharmacia) |
| | | | | | | with a |
| | | | | | | modified |
| | | | | | | polylinker |
| | | | | | | V TYPE |
| L0757 | Soares_senescent_{—} | senescent fibroblast | | | | pT7T3D |
| | fibroblasts_NbHSF | | | | | (Pharmacia) |
| | | | | | | with a |
| | | | | | | modified |
| | | | | | | polylinker |
| | | | | | | V TYPE |
| L0758 | Soares_testis_NHT | | | | | pT7T3D- |
| | | | | | | Pac |
| | | | | | | (Pharmacia) |
| | | | | | | with a |
| | | | | | | modified |
| | | | | | | polylinker |
| L0759 | Soares_total_fetus_N | | | | | pT7T3D- |
| | b2HF8_9w | | | | | Pac |
| | | | | | | (Pharmacia) |
| | | | | | | with a |
| | | | | | | modified |
| | | | | | | polylinker |
| L0761 | NCI_CGAP_CLL1 | B-cell, chronic | | | | pT7T3D- |
| | | lymphotic leukemia | | | | Pac |
| | | | | | | (Pharmacia) |
| | | | | | | with a |
| | | | | | | modified |
| | | | | | | polylinker |
| L0762 | NCI_CGAP_Br1.1 | breast | | | | pT7T3D- |
| | | | | | | Pac |
| | | | | | | (Pharmacia) |
| | | | | | | with a |
| | | | | | | modified |
| | | | | | | polylinker |
| L0763 | NCI_CGAP_Br2 | breast | | | | pT7T3D- |
| | | | | | | Pac |
| | | | | | | (Pharmacia) |
| | | | | | | with a |
| | | | | | | modified |
| | | | | | | polylinker |
| L0764 | NCI_CGAP_Co3 | colon | | | | pT7T3D- |
| | | | | | | Pac |
| | | | | | | (Pharmacia) |
| | | | | | | with a |
| | | | | | | modified |
| | | | | | | polylinker |
| L0766 | NCI_CGAP_GCB1 | germinal center B | | | | pT7T3D- |
| | | cell | | | | Pac |
| | | | | | | (Pharmacia) |
| | | | | | | with a |
| | | | | | | modified |
| | | | | | | polylinker |
| L0768 | NCI_CGAP_GC4 | pooled germ cell | | | | pT7T3D- |
| | | tumors | | | | Pac |
| | | | | | | (Pharmacia) |
| | | | | | | with a |
| | | | | | | modified |
| | | | | | | polylinker |
| L0769 | NCI_CGAP_Brn25 | anaplastic | brain | | | pT7T3D- |
| | | oligodendroglioma | | | | Pac |
| | | | | | | (Pharmacia) |
| | | | | | | with a |
| | | | | | | modified |
| | | | | | | polylinker |
| L0770 | NCI_CGAP_Brn23 | glioblastoma | brain | | | pT7T3D- |
| | | (pooled) | | | | Pac |
| | | | | | | (Pharmacia) |
| | | | | | | with a |
| | | | | | | modified |
| | | | | | | polylinker |
| L0772 | NCI_CGAP₋Co10 | colon tumor RER+ | colon | | | pT7T3D- |
| | | | | | | Pac |
| | | | | | | (Pharmacia) |
| | | | | | | with a |
| | | | | | | modified |
| | | | | | | polylinker |
| L0775 | NCI_CGAP_Kid5 | 2 pooled tumors | kidney | | | pT7T3D- |
| | | (clear cell type) | | | | Pac |
| | | | | | | (Pharmacia) |
| | | | | | | with a |
| | | | | | | modified |
| | | | | | | polylinker |
| L0776 | NCI_CGAP_Lu5 | carcinoid | lung | | | pT7T3D- |
| | | | | | | Pac |
| | | | | | | (Pharmacia) |
| | | | | | | with a |
| | | | | | | modified |
| | | | | | | polylinker |
| L0777 | Soares_NhHMPu_S1 | Pooled human | mixed (see | | | pT7T3D- |
| | | melanocyte, fetal | below) | | | Pac |
| | | heart, and pregnant | | | | (Pharmacia |
| | | | | | | with a |
| | | | | | | modified |
| | | | | | | polylinker |
| L0779 | Soares_NFL_T_{—} | | pooled | | | pT7T3D- |
| | GBC_S1 | | | | | Pac |
| | | | | | | (Pharmacia) |
| | | | | | | with a |
| | | | | | | modified |
| | | | | | | polylinker |
| L0780 | Soares_NSF_F8_9W_{—} | | pooled | | | pT7T3D- |
| | OT_PA_P_S1 | | | | | Pac |
| | | | | | | (Pharmacia) |
| | | | | | | with a |
| | | | | | | modified |
| | | | | | | polylinker |
| L0783 | NCI_CGAP_Pr22 | normal prostate | prostate | | | pT7T3D- |
| | | | | | | Pac |
| | | | | | | (Pharmacia) |
| | | | | | | with a |
| | | | | | | modified |
| | | | | | | polylinker |
| L0789 | NCI_CGAP_Sub3 | | | | | pT7T3D- |
| | | | | | | Pac |
| | | | | | | (Pharmacia) |
| | | | | | | with a |
| | | | | | | modified |
| | | | | | | polylinker |
| L0794 | NCI_CGAP_GC6 | pooled germ cell | | | | pT7T3D- |
| | | tumors | | | | Pac |
| | | | | | | (Pharmacia) |
| | | | | | | with a |
| | | | | | | modified |
| | | | | | | polylinker |
| L0800 | NCI_CGAP_Co16 | colon tumor, RER+ | colon | | | pT7T3D- |
| | | | | | | Pac |
| | | | | | | (Pharmacia) |
| | | | | | | with a |
| | | | | | | modified |
| | | | | | | polylinker |
| L0803 | NCI_CGAP_Kid11 | | kidney | | | pT7T3D- |
| | | | | | | Pac |
| | | | | | | (Pharmacia) |
| | | | | | | with a |
| | | | | | | modified |
| | | | | | | polylinker |
| L0804 | NCI_CGAP_Kid12 | 2 pooled tumors | kidney | | | pT7T3D- |
| | | (clear cell type) | | | | Pac |
| | | | | | | (Pharmacia) |
| | | | | | | with a |
| | | | | | | modified |
| | | | | | | polylinker |
| L0805 | NCI_CGAP_Lu24 | carcinoid | lung | | | pT7T3D- |
| | | | | | | Pac |
| | | | | | | (Pharmacia) |
| | | | | | | with a |
| | | | | | | modified |
| | | | | | | polylinker |
| L0809 | NCI_CGAP_Pr28 | | prostate | | | pT7T3D- |
| | | | | | | Pac |
| | | | | | | (Pharmacia) |
| | | | | | | with a |
| | | | | | | modified |
| | | | | | | polylinker |
| L2245 | NEM subtracted | | | | | pUEX1 |
| | human fetal kidney | | | | | |
| | cDNA | | | | | |

[0094] TABLE 5

| OMIM | |
|---|---|
| Reference | Description |
| 102200 | Somatotrophinoma |
| 104770 | Amyloidosis, secondary, susceptibility to |
| 106100 | Angioedema, hereditary |
| 107670 | Apolipoprotein A-II deficiency |
| 110700 | Vivax malaria, susceptibility to |
| 131100 | Multiple endocrine neoplasia I |
| 131100 | Prolactinoma, hyperparathyroidism, carcinoid syndrome |
| 131100 | Carcinoid tumor of lung |
| 133780 | Vitreoretinopathy, exudative, familial |
| 135940 | Ichthyosis vulgaris, 146700 |
| 145001 | Hyperparathyroidism—jaw tumor syndrome |
| 146790 | Lupus nephritis, susceptibility to |
| 147050 | Atopy |
| 152445 | Vohwinkel syndrome, 124500 |
| 152445 | Erythrokeratoderma, progressive symmetric, 602036 |
| 153700 | Macular dystrophy, vitelliform type |
| 159001 | Muscular dystrophy, limb-girdle, type 1B |
| 161015 | Mitochondrial complex I deficiency, 252010 |
| 164009 | Leukemia, acute promyelocytic, NUMA/RARA type |
| 168461 | Multiple myeloma, 254250 |
| 168461 | Parathyroid adenomatosis 1 |
| 168461 | Centrocytic lymphoma |
| 174000 | Medullary cystic kidney disease, AD |
| 179755 | Renal cell carcinoma, papillary, 1 |
| 180721 | Retinitis pigmentosa, digenic |
| 180840 | Susceptibility to IDDM |
| 182860 | Pyropoikilocytosis |
| 182860 | Spherocytosis, recessive |
| 182860 | Elliptocytosis-2 |
| 191181 | Cervical carcinoma |
| 191315 | Insensitivity to pain, congenital, with anhidrosis, 256800 |
| 193235 | Vitreoretinopathy, neovascular inflammatory |
| 209901 | Bardet-Biedl syndrome 1 |
| 230800 | Gaucher disease |
| 230800 | Gaucher disease with cardiovascular calcification |
| 232600 | McArdle disease |
| 259700 | Osteopetrosis, recessive |
| 259770 | Osteoporosis-pseudoglioma syndrome |
| 266200 | Anemia, hemolytic, due to PK deficiency |
| 600045 | Xeroderma pigmentosum, group E, subtype 2 |
| 600319 | Diabetes mellitus, insulin-dependent, 4 |
| 600528 | CPT deficiency hepatic, type I, 255120 |
| 600897 | Cataract, zonular pulverulent-1, 116200 |
| 601105 | Pycnodysostosis, 265800 |
| 601412 | Deafness, autosomal dominant 7 |
| 601652 | Glaucoma 1A, primary open angle, juvenile-onset, 137750 |
| 601884 | [High bone mass] |
| 602491 | Hyperlipidemia, familial combined, 1 |

[0095] Polynucleotide and Polypeptide Variants

[0096] The present invention is also directed to variants of the ovarian and/or breast cancer associated polynucleotide sequence disclosed in SEQ ID NO:X or the complementary strand thereto, nucleotide sequences encoding the polypeptide of SEQ ID NO:Y, the nucleotide sequence of SEQ ID NO:X encoding the polypeptide sequence as defined in column 6 of Table 1A, nucleotide sequences encoding the polypeptide as defined in column 6 of Table 1A, the nucleotide sequence as defined in columns 8 and 9 of Table 2, nucleotide sequences encoding the polypeptide encoded by the nucleotide sequence as defined in columns 8 and 9 of Table 2, the nucleotide sequence as defined in column 6 of Table 1B, nucleotide sequences encoding the polypeptide encoded by the nucleotide sequence as defined in column 6 of Table 1 B, the cDNA sequence contained in Clone ID NO:Z, and/or nucleotide sequences encoding a polypeptide encoded by the cDNA sequence contained in Clone ID NO:Z.

[0097] The present invention also encompasses variants of the polypeptide sequence disclosed in SEQ ID NO:Y, a polypeptide sequence as defined in column 6 of Table 1A, a polypeptide sequence encoded by the polynucleotide sequence in SEQ ID NO:X a polypeptide sequence encoded by the nucleotide sequence as defined in columns 8 and 9 of Table 2, a polypeptide sequence encoded by the nucleotide sequence as defined in column 6 of Table 1B, a polypeptide sequence encoded by the complement of the polynucleotide sequence in SEQ ID NO:X, and/or a polypeptide sequence encoded by the cDNA sequence contained in Clone ID NO:Z.

[0098] “Variant” refers to a polynucleotide or polypeptide differing from the polynucleotide or polypeptide of the present invention, but retaining essential properties thereof. Generally, variants are overall closely similar, and, in many regions, identical to the polynucleotide or polypeptide of the present invention.

[0099] Thus, one aspect of the invention provides an isolated nucleic acid molecule comprising, or alternatively consisting of, a polynucleotide having a nucleotide sequence selected from the group consisting of: (a) a nucleotide sequence described in SEQ ID NO:X or contained in the cDNA sequence of Clone ID NO:Z; (b) a nucleotide sequence in SEQ ID NO:X or the cDNA in Clone ID NO:Z which encodes a mature ovarian and/or breast cancer associated polypeptide; (c) a nucleotide sequence in SEQ ID NO:X or the cDNA sequence of Clone ID NO:Z, which encodes a biologically active fragment of a ovarian and/or breast cancer associated polypeptide; (d) a nucleotide sequence in SEQ ID NO:X or the cDNA sequence of Clone ID NO:Z, which encodes an antigenic fragment of a ovarian and/or breast cancer associated polypeptide; (e) a nucleotide sequence encoding a ovarian and/or breast cancer associated polypeptide having the complete amino acid sequence of SEQ ID NO:Y or the complete amino acid sequence encoded by the cDNA in Clone ID NO:Z; (f) a nucleotide sequence encoding a mature ovarian and/or breast cancer associated polypeptide of the amino acid sequence of SEQ ID NO:Y or the amino acid sequence encoded by the cDNA in Clone ID NO:Z; (g) a nucleotide sequence encoding a biologically active fragment of a ovarian and/or breast cancer associated polypeptide having the complete amino acid sequence of SEQ ID NO:Y or the complete amino acid sequence encoded by the cDNA in Clone ID NO:Z; (h) a nucleotide sequence encoding an antigenic fragment of a ovarian and/or breast cancer associated polypeptide having the complete amino acid sequence of SEQ ID NO:Y or the complete amino acid sequence encoded by the cDNA in Clone ID NO:Z; and (i) a nucleotide sequence complementary to any of the nucleotide sequences in (a), (b), (c), (d), (e), (f), (g), or (h), above.

[0100] The present invention is also directed to nucleic acid molecules which comprise, or alternatively consist of, a nucleotide sequence which is at least 80%, 85%, 90%, 95%, 96%, 97%, 98%, 99% or 100%, identical to, for example, any of the nucleotide sequences in (a), (b), (c), (d), (e), (f), (g), (h), or (i) above, the nucleotide coding sequence in SEQ ID NO:X or the complementary strand thereto, the nucleotide coding sequence of the cDNA contained in Clone ID NO:Z or the complementary strand thereto, a nucleotide sequence encoding the polypeptide of SEQ ID NO:Y, a nucleotide sequence encoding a polypeptide sequence encoded by the nucleotide sequence in SEQ ID NO:X, a polypeptide sequence encoded by the complement of the polynucleotide sequence in SEQ ID NO:X, a nucleotide sequence encoding the polypeptide encoded by the cDNA contained in Clone ID NO:Z, the nucleotide coding sequence in SEQ ID NO:X as defined in columns 8 and 9 of Table 2 or the complementary strand thereto, a nucleotide sequence encoding the polypeptide encoded by the nucleotide sequence in SEQ ID NO:X as defined in columns 8 and 9 of Table 2 or the complementary strand thereto, the nucleotide coding sequence in SEQ ID NO:B as defined in column 6 of Table 1B or the complementary strand thereto, a nucleotide sequence encoding the polypeptide encoded by the nucleotide sequence in SEQ ID NO:B as defined in column 6 of Table 1B or the complementary strand thereto, the nucleotide sequence in SEQ ID NO:X encoding the polypeptide sequence as defined in column 6 of Table 1A or the complementary strand thereto, nucleotide sequences encoding a polypeptide as defined in column 6 of Table 1A or the complementary strand thereto, and/or polynucleotide fragments of any of these nucleic acid molecules (e.g., those fragments described herein). Polynucleotides which hybridize to the complement of these nucleic acid molecules under stringent hybridization conditions or alternatively, under lower stringency conditions, are also encompassed by the invention, as are polypeptides encoded by these polynucleotides and nucleic acids.

[0101] In a preferred embodiment, the invention encompasses nucleic acid molecules which comprise, or alternatively, consist of a polynucleotide which hybridizes under stringent hybridization conditions, or alternatively, under lower stringency conditions, to a polynucleotide in (a), (b), (c), (d), (e), (f), (g), (h), or (i) above, as are polypeptides encoded by these polynucleotides. In another preferred embodiment, polynucleotides which hybridize to the complement of these nucleic acid molecules under stringent hybridization conditions or alternatively, under lower stringency conditions, are also encompassed by the invention, as are polypeptides encoded by these polynucleotides.

[0102] In another embodiment, the invention provides a purified protein comprising, or alternatively consisting of, a polypeptide having an amino acid sequence selected from the group consisting of: (a) the complete amino acid sequence of SEQ ID NO:Y or the complete amino acid sequence encoded by the cDNA in Clone ID NO:Z; (b) the amino acid sequence of a mature ovarian and/or breast cancer associated polypeptide having the amino acid sequence of SEQ ID NO:Y or the amino acid sequence encoded by the cDNA in Clone ID NO:Z; (c) the amino acid sequence of a biologically active fragment of a ovarian and/or breast cancer associated polypeptide having the complete amino acid sequence of SEQ ID NO:Y or the complete amino acid sequence encoded by the cDNA in Clone ID NO:Z; and (d) the amino acid sequence of an antigenic fragment of a ovarian and/or breast cancer associated polypeptide having the complete amino acid sequence of SEQ ID NO:Y or the complete amino acid sequence encoded by the cDNA in Clone ID NO:Z.

[0103] The present invention is also directed to proteins which comprise, or alternatively consist of, an amino acid sequence which is at least 80%, 85%, 90%, 95%, 96%, 97%, 98%, 99% or 100%, identical to, for example, any of the amino acid sequences in (a), (b), (c), or (d), above, the amino acid sequence shown in SEQ ID NO:Y, the amino acid sequence encoded by the cDNA contained in Clone ID NO:Z, the amino acid sequence of the polypeptide encoded by the nucleotide sequence in SEQ ID NO:X as defined in columns 8 and 9 of Table 2, the amino acid sequence of the polypeptide encoded by the nucleotide sequence in SEQ ID NO:B as defined in column 6 of Table 1B, the amino acid sequence as defined in column 6 of Table 1A, an amino acid sequence encoded by the nucleotide sequence in SEQ ID NO:X, and an amino acid sequence encoded by the complement of the polynucleotide sequence in SEQ ID NO:X. Fragments of these polypeptides are also provided (e.g., those fragments described herein). Further proteins encoded by polynucleotides which hybridize to the complement of the nucleic acid molecules encoding these amino acid sequences under stringent hybridization conditions or alternatively, under lower stringency conditions, are also encompassed by the invention, as are the polynucleotides encoding these proteins.

[0104] By a nucleic acid having a nucleotide sequence at least, for example, 95% “identical” to a reference nucleotide sequence of the present invention, it is intended that the nucleotide sequence of the nucleic acid is identical to the reference sequence except that the nucleotide sequence may include up to five point mutations per each 100 nucleotides of the reference nucleotide sequence encoding the polypeptide. In other words, to obtain a nucleic acid having a nucleotide sequence at least 95% identical to a reference nucleotide sequence, up to 5% of the nucleotides in the reference sequence may be deleted or substituted with another nucleotide, or a number of nucleotides up to 5% of the total nucleotides in the reference sequence may be inserted into the reference sequence. The query sequence may be an entire sequence referred to in Table 1A or 2 as the ORF (open reading frame), or any fragment specified, as described herein.

[0105] As a practical matter, whether any particular nucleic acid molecule or polypeptide is at least 80%, 85%, 90%, 95%, 96%, 97%, 98% or 99% identical to a nucleotide sequence of the present invention can be determined conventionally using known computer programs. A preferred method for determining the best overall match between a query sequence (a sequence of the present invention) and a subject sequence, also referred to as a global sequence alignment, can be determined using the FASTDB computer program based on the algorithm of Brutlag et al. (Comp. App. Biosci. 6:237-245 (1990)). In a sequence alignment the query and subject sequences are both DNA sequences. An RNA sequence can be compared by converting U's to T's. The result of said global sequence alignment is expressed as percent identity. Preferred parameters used in a FASTDB alignment of DNA sequences to calculate percent identity are: Matrix=Unitary, k-tuple=4, Mismatch Penalty=1, Joining Penalty=30, Randomization Group Length=0, Cutoff Score=1, Gap Penalty=5, Gap Size Penalty 0.05, Window Size=500 or the length of the subject nucleotide sequence, whichever is shorter.

[0106] If the subject sequence is shorter than the query sequence because of 5′ or 3′ deletions, not because of internal deletions, a manual correction must be made to the results. This is because the FASTDB program does not account for 5′ and 3′ truncations of the subject sequence when calculating percent identity. For subject sequences truncated at the 5′ or 3′ ends, relative to the query sequence, the percent identity is corrected by calculating the number of bases of the query sequence that are 5′ and 3′ of the subject sequence, which are not matched/aligned, as a percent of the total bases of the query sequence. Whether a nucleotide is matched/aligned is determined by results of the FASTDB sequence alignment. This percentage is then subtracted from the percent identity, calculated by the above FASTDB program using the specified parameters, to arrive at a final percent identity score. This corrected score is what is used for the purposes of the present invention. Only bases outside the 5′ and 3′ bases of the subject sequence, as displayed by the FASTDB alignment, which are not matched/aligned with the query sequence, are calculated for the purposes of manually adjusting the percent identity score.

[0107] For example, a 90 base subject sequence is aligned to a 100 base query sequence to determine percent identity. The deletions occur at the 5′ end of the subject sequence and therefore, the FASTDB alignment does not show a matched/alignment of the first 10 bases at 5′ end. The 10 unpaired bases represent 10% of the sequence (number of bases at the 5′ and 3′ ends not matched/total number of bases in the query sequence) so 10% is subtracted from the percent identity score calculated by the FASTDB program. If the remaining 90 bases were perfectly matched the final percent identity would be 90%. In another example, a 90 base subject sequence is compared with a 100 base query sequence. This time the deletions are internal deletions so that there are no bases on the 5′ or 3′ of the subject sequence which are not matched/aligned with the query. In this case the percent identity calculated by FASTDB is not manually corrected. Once again, only bases 5′ and 3′ of the subject sequence which are not matched/aligned with the query sequence are manually corrected for. No other manual corrections are to made for the purposes of the present invention.

[0108] By a polypeptide having an amino acid sequence at least, for example, 95% “identical” to a query amino acid sequence of the present invention, it is intended that the amino acid sequence of the subject polypeptide is identical to the query sequence except that the subject polypeptide sequence may include up to five amino acid alterations per each 100 amino acids of the query amino acid sequence. In other words, to obtain a polypeptide having an amino acid sequence at least 95% identical to a query amino acid sequence, up to 5% of the amino acid residues in the subject sequence may be inserted, deleted, (indels) or substituted with another amino acid. These alterations of the reference sequence may occur at the amino or carboxy terminal positions of the reference amino acid sequence or anywhere between those terminal positions, interspersed either individually among residues in the reference sequence or in one or more contiguous groups within the reference sequence.

[0109] As a practical matter, whether any particular polypeptide is at least 80%, 85%, 90%, 95%, 96%, 97%, 98% or 99% identical to, for instance, the amino acid sequence of a polypeptide referred to in Table 1A (e.g., an amino acid sequence identified in columns 5 or 6) or Table 2 (e.g., the amino acid sequence of the polypeptide encoded by the polynucleotide sequence defined in columns 8 and 9 of Table 2) or a fragment thereof, the amino acid sequence of the polypeptide encoded by the polynucleotide sequence in SEQ ID NO:B as defined in column 6 of Table 1B or a fragment thereof, the amino acid sequence of the polypeptide encoded by the nucleotide sequence in SEQ ID NO:X or a fragment thereof, or an amino acid sequence of the polypeptide encoded by cDNA contained in Clone ID NO:Z, or a fragment thereof, can be determined conventionally using known computer programs. A preferred method for determining the best overall match between a query sequence (a sequence of the present invention) and a subject sequence, also referred to as a global sequence alignment, can be determined using the FASTDB computer program based on the algorithm of Brutlag et al. (Comp. App. Biosci. 6:237-245 (1990)). In a sequence alignment the query and subject sequences are either both nucleotide sequences or both amino acid sequences. The result of said global sequence alignment is expressed as percent identity. Preferred parameters used in a FASTDB amino acid alignment are: Matrix=PAM 0, k-tuple=2, Mismatch Penalty=1, Joining Penalty=20, Randomization Group Length=0, Cutoff Score=1, Window Size=sequence length, Gap Penalty=5, Gap Size Penalty=0.05, Window Size=500 or the length of the subject amino acid sequence, whichever is shorter.

[0110] If the subject sequence is shorter than the query sequence due to N- or C-terminal deletions, not because of internal deletions, a manual correction must be made to the results. This is because the FASTDB program does not account for N- and C-terminal truncations of the subject sequence when calculating global percent identity. For subject sequences truncated at the N- and C-termini, relative to the query sequence, the percent identity is corrected by calculating the number of residues of the query sequence that are N- and C-terminal of the subject sequence, which are not matched/aligned with a corresponding subject residue, as a percent of the total bases of the query sequence. Whether a residue is matched/aligned is determined by results of the FASTDB sequence alignment. This percentage is then subtracted from the percent identity, calculated by the above FASTDB program using the specified parameters, to arrive at a final percent identity score. This final percent identity score is what is used for the purposes of the present invention. Only residues to the N- and C-termini of the subject sequence, which are not matched/aligned with the query sequence, are considered for the purposes of manually adjusting the percent identity score. That is, only query residue positions outside the farthest N- and C-terminal residues of the subject sequence.

[0111] For example, a 90 amino acid residue subject sequence is aligned with a 100 residue query sequence to determine percent identity. The deletion occurs at the N-terminus of the subject sequence and therefore, the FASTDB alignment does not show a matching/alignment of the first 10 residues at the N-terminus. The 10 unpaired residues represent 10% of the sequence (number of residues at the N- and C-termini not matched/total number of residues in the query sequence) so 10% is subtracted from the percent identity score calculated by the FASTDB program. If the remaining 90 residues were perfectly matched the final percent identity would be 90%. In another example, a 90 residue subject sequence is compared with a 100 residue query sequence. This time the deletions are internal deletions so there are no residues at the N- or C-termini of the subject sequence which are not matched/aligned with the query. In this case the percent identity calculated by FASTDB is not manually corrected. Once again, only residue positions outside the N- and C-terminal ends of the subject sequence, as displayed in the FASTDB alignment, which are not matched/aligned with the query sequence are manually corrected for. No other manual corrections are to be made for the purposes of the present invention.

[0112] The polynucleotide variants of the invention may contain alterations in the coding regions, non-coding regions, or both. Especially preferred are polynucleotide variants containing alterations, which produce silent substitutions, additions, or deletions, but do not alter the properties or activities of the encoded polypeptide. Nucleotide variants produced by silent substitutions due to the degeneracy of the genetic code are preferred. Moreover, polypeptide variants in which less than 50, less than 40, less than 30, less than 20, less than 10, or 5-50, 5-25, 5-10, 1-5, or 1-2 amino acids are substituted, deleted, or added in any combination are also preferred. Polynucleotide variants can be produced for a variety of reasons, e.g., to optimize codon expression for a particular host (change codons in the human mRNA to those preferred by a bacterial host such as E. coli).

[0113] Naturally occurring variants are called “allelic variants,” and refer to one of several alternate forms of a gene occupying a given locus on a chromosome of an organism. (Genes II, Lewin, B., ed., John Wiley & Sons, New York (1985).) These allelic variants can vary at either the polynucleotide and/or polypeptide level and are included in the present invention. Alternatively, non-naturally occurring variants may be produced by mutagenesis techniques or by direct synthesis.

[0114] Using known methods of protein engineering and recombinant DNA technology, variants may be generated to improve or alter the characteristics of the polypeptides of the present invention. For instance, one or more amino acids can be deleted from the N-terminus or C-terminus of the polypeptides of the present invention without substantial loss of biological function. As an example, the authors of Ron et al., J. Biol. Chem. 268: 2984-2988 (1993), reported variant KGF proteins having heparin binding activity even after deleting 3, 8, or 27 amino-terminal amino acid residues. Similarly, Interferon gamma exhibited up to ten times higher activity after deleting 8-10 amino acid residues from the carboxy terminus of this protein. (Dobeli et al., J. Biotechnology 7:199-216 (1988).)

[0115] Moreover, ample evidence demonstrates that variants often retain a biological activity similar to that of the naturally occurring protein. For example, Gayle and coworkers (J. Biol. Chem. 268:22105-22111 (1993)) conducted extensive mutational analysis of human cytokine IL-1a. They used random mutagenesis to generate over 3,500 individual IL-1a mutants that averaged 2.5 amino acid changes per variant over the entire length of the molecule. Multiple mutations were examined at every possible amino acid position. The investigators found that “[m]ost of the molecule could be altered with little effect on either [binding or biological activity].”In fact, only 23 unique amino acid sequences, out of more than 3,500 nucleotide sequences examined, produced a protein that significantly differed in activity from wild-type.

[0116] Furthermore, even if deleting one or more amino acids from the N-terminus or C-terminus of a polypeptide results in modification or loss of one or more biological functions, other biological activities may still be retained. For example, the ability of a deletion variant to induce and/or to bind antibodies, which recognize the secreted form will likely be retained when less than the majority of the residues of the secreted form are removed from the N-terminus or C-terminus. Whether a particular polypeptide lacking N- or C-terminal residues of a protein retains such immunogenic activities can readily be determined by routine methods described herein and otherwise known in the art.

[0117] Thus, the invention further includes polypeptide variants which show a functional activity (e.g., biological activity) of the polypeptides of the invention. Such variants include deletions, insertions, inversions, repeats, and substitutions selected according to general rules known in the art so as have little effect on activity.

[0118] The present application is directed to nucleic acid molecules at least 80%, 85%, 90%, 95%, 96%, 97%, 98%, 99% or 100% identical to the nucleic acid sequences disclosed herein, (e.g., encoding a polypeptide having the amino acid sequence of an N and/or C terminal deletion), irrespective of whether they encode a polypeptide having functional activity. This is because even where a particular nucleic acid molecule does not encode a polypeptide having functional activity, one of skill in the art would still know how to use the nucleic acid molecule, for instance, as a hybridization probe or a polymerase chain reaction (PCR) primer. Uses of the nucleic acid molecules of the present invention that do not encode a polypeptide having functional activity include, inter alia, (1) isolating a gene or allelic or splice variants thereof in a cDNA library; (2) in situ hybridization (e.g., “FISH”) to metaphase chromosomal spreads to provide precise chromosomal location of the gene, as described in Verma et al., Human Chromosomes: A Manual of Basic Techniques, Pergamon Press, New York (1988); (3) Northern Blot analysis for detecting mRNA expression in specific tissues (e.g., normal ovarian and/or breast or diseased ovarian and/or breast tissues); and (4) in situ hybridization (e.g., histochemistry) for detecting mRNA expression in specific tissues (e.g., normal ovarian and/or breast or diseased ovarian and/or breast tissues).

[0119] Preferred, however, are nucleic acid molecules having sequences at least 80%, 85%, 90%, 95%, 96%, 97%, 98%, 99% or 100% identical to the nucleic acid sequences disclosed herein, which do, in fact, encode a polypeptide having functional activity. By a polypeptide having “functional activity” is meant, a polypeptide capable of displaying one or more known functional activities associated with a full-length (complete) protein of the invention. Such functional activities include, but are not limited to, biological activity, antigenicity [ability to bind (or compete with a polypeptide of the invention for binding) to an anti-polypeptide of the invention antibody], immunogenicity (ability to generate antibody which binds to a specific polypeptide of the invention), ability to form multimers with polypeptides of the invention, and ability to bind to a receptor or ligand for a polypeptide of the invention.

[0120] The functional activity of the polypeptides, and fragments, variants and derivatives of the invention, can be assayed by various methods.

[0121] For example, in one embodiment where one is assaying for the ability to bind or compete with full-length polypeptide of the present invention for binding to an anti-polypeptide of the invention antibody, various immunoassays known in the art can be used, including but not limited to, competitive and non-competitive assay systems using techniques such as radioimmunoassays, ELISA (enzyme linked immunosorbent assay), “sandwich” immunoassays, immunoradiometric assays, gel diffusion precipitation reactions, immunodiffusion assays, in situ immunoassays (using colloidal gold, enzyme or radioisotope labels, for example), western blots, precipitation reactions, agglutination assays (e.g., gel agglutination assays, hemagglutination assays), complement fixation assays, immunofluorescence assays, protein A assays, and immunoelectrophoresis assays, etc. In one embodiment, antibody binding is detected by detecting a label on the primary antibody. In another embodiment, the primary antibody is detected by detecting binding of a secondary antibody or reagent to the primary antibody. In a further embodiment, the secondary antibody is labeled. Many means are known in the art for detecting binding in an immunoassay and are within the scope of the present invention.

[0122] In another embodiment, where a ligand is identified, or the ability of a polypeptide fragment, variant or derivative of the invention to multimerize is being evaluated, binding can be assayed, e.g., by means well-known in the art, such as, for example, reducing and non-reducing gel chromatography, protein affinity chromatography, and affinity blotting. See generally, Phizicky et al., Microbiol. Rev. 59:94-123 (1995). In another embodiment, the ability of physiological correlates of a polypeptide of the present invention to bind to a substrate(s) of the polypeptide of the invention can be routinely assayed using techniques known in the art.

[0123] In addition, assays described herein (see Examples) and otherwise known in the art may routinely be applied to measure the ability of polypeptides of the present invention and fragments, variants and derivatives thereof to elicit polypeptide related biological activity (either in vitro or in vivo). Other methods will be known to the skilled artisan and are within the scope of the invention.

[0124] Of course, due to the degeneracy of the genetic code, one of ordinary skill in the art will immediately recognize that a large number of the nucleic acid molecules having a sequence at least 80%, 85%, 90%, 95%, 96%, 97%, 98%, 99%, or 100% identical to, for example, the nucleic acid sequence of the cDNA contained in Clone ID NO:Z, a nucleic acid sequence referred to in Table 1A (e.g., SEQ ID NO:X), a nucleic acid sequence disclosed in Table 2 (e.g., the nucleic acid sequence delineated in columns 8 and 9) or fragments thereof, will encode polypeptides “having functional activity.” In fact, since degenerate variants of any of these nucleotide sequences all encode the same polypeptide, in many instances, this will be clear to the skilled artisan even without performing. the above described comparison assay. It will be further recognized in the art that, for such nucleic acid molecules that are not degenerate variants, a reasonable number will also encode a polypeptide having functional activity. This is because the skilled artisan is fully aware of amino acid substitutions that are either less likely or not likely to significantly effect protein function (e.g., replacing one aliphatic-amino acid with a second aliphatic amino acid), as further described below.

[0125] For example, guidance concerning how to make phenotypically silent amino acid substitutions is provided in Bowie et al., “Deciphering the Message in Protein Sequences: Tolerance to Amino Acid Substitutions,” Science 247:1306-1310 (1990), wherein the authors indicate that there are two main strategies for studying the tolerance of an amino acid sequence to change.

[0126] The first strategy exploits the tolerance of amino acid substitutions by natural selection during the process of evolution. By comparing amino acid sequences in different species, conserved amino acids can be identified. These conserved amino acids are likely important for protein function. In contrast, the amino acid positions where substitutions have been tolerated by natural selection indicates that these positions are not critical for protein function. Thus, positions tolerating amino acid substitution could be modified while still maintaining biological activity of the protein.

[0127] The second strategy uses genetic engineering to introduce amino acid changes at specific positions of a cloned gene to identify regions critical for protein function. For example, site directed mutagenesis or alanine-scanning mutagenesis (introduction of single alanine mutations at every residue in the molecule) can be used. See Cunningham et al., Science 244:1081-1085 (1989). The resulting mutant molecules can then be tested for biological activity.

[0128] As the authors state, these two strategies have revealed that proteins are surprisingly tolerant of amino acid substitutions. The authors further indicate which amino acid changes are likely to be permissive at certain amino acid positions in the protein. For example, most buried (within the tertiary structure of the protein) amino acid residues require nonpolar side chains, whereas few features of surface side chains are generally conserved. Moreover, tolerated conservative amino acid substitutions involve replacement of the aliphatic or hydrophobic amino acids Ala, Val, Leu and Ile; replacement of the hydroxyl residues Ser and Thr; replacement of the acidic residues Asp and Glu; replacement of the amide residues Asn and Gln, replacement of the basic residues Lys, Arg, and His; replacement of the aromatic residues Phe, Tyr, and Trp, and replacement of the small-sized amino acids Ala, Ser, Thr, Met, and Gly. Besides conservative amino acid substitutions, variants of the present invention include (i) substitutions with one or more of the non-conserved amino acid residues, where the substituted amino acid residues may or may not be one encoded by the genetic code, or (ii) substitutions with one or more of the amino acid residues having a substituent group, or (iii) fusion of the mature polypeptide with another compound, such as a compound to increase the stability and/or solubility of the polypeptide (for example, polyethylene glycol), or (iv) fusion of the polypeptide with additional amino acids, such as, for example, an IgG Fc fusion region peptide, serum albumin (preferably human serum albumin) or a fragment or variant thereof, or leader or secretory sequence, or a sequence facilitating purification. Such variant polypeptides are deemed to be within the scope of those skilled in the art from the teachings herein.

[0129] For example, polypeptide variants containing amino acid substitutions of charged amino acids with other charged or neutral amino acids may produce proteins with improved characteristics, such as less aggregation. Aggregation of pharmaceutical formulations both reduces activity and increases clearance due to the aggregate's immunogenic activity. See Pinckard et al., Clin. Exp. Immunol. 2:331-340 (1967); Robbins et al., Diabetes 36: 838-845 (1987); Cleland et al., Crit. Rev. Therapeutic Drug Carrier Systems 10:307-377 (1993).

[0130] A further embodiment of the invention relates to polypeptides which comprise the amino acid sequence of a polypeptide having an amino acid sequence which contains at least one amino acid substitution, but not more than 50 amino acid substitutions, even more preferably, not more than 40 amino acid substitutions, still more preferably, not more than 30 amino acid substitutions, and still even more preferably, not more than 20 amino acid substitutions from a polypeptide sequence disclosed herein. Of course it is highly preferable for a polypeptide to have an amino acid sequence which comprises the amino acid sequence of a polypeptide of SEQ ID NO:Y, an amino acid sequence encoded by SEQ ID NO:X, an amino acid sequence encoded by the portion of SEQ ID NO:X as defined in columns 8 and 9 of Table 2, an amino acid sequence encoded by the complement of SEQ ID NO:X, and/or the amino acid sequence encoded by cDNA contained in Clone ID NO:Z which contains, in order of ever-increasing preference, at least one, but not more than 10, 9, 8, 7, 6, 5, 4, 3, 2 or 1 amino acid substitutions.

[0131] In specific embodiments, the polypeptides of the invention comprise, or alternatively, consist of, fragments or variants of a reference amino acid sequence selected from: (a) the amino acid sequence of SEQ ID NO:Y or fragments thereof (e.g., the mature form and/or other fragments described herein); (b) the amino acid sequence encoded by SEQ ID NO:X or fragments thereof, (c) the amino acid sequence encoded by the complement of SEQ ID NO:X or fragments thereof, (d) the amino acid sequence encoded by the portion of SEQ ID NO:X as defined in columns 8 and 9 of Table 2 or fragments thereof; and (e) the amino acid sequence encoded by cDNA contained in Clone ID NO:Z or fragments thereof, wherein the fragments or variants have 1-5, 5-10, 5-25, 5-50, 10-50 or 50-150, amino acid residue additions, substitutions, and/or deletions when compared to the reference amino acid sequence. In preferred embodiments, the amino acid substitutions are conservative. Polynucleotides encoding these polypeptides are also encompassed by the invention.

[0132] Polynucleotide and Polypeptide Fragments

[0133] The present invention is also directed to polynucleotide fragments of the polynucleotides (nucleic acids) of the invention. In the present invention, a “polynucleotide fragment” refers to a polynucleotide having a nucleic acid sequence which, for example: is a portion of the cDNA contained in Clone ID NO:Z or the complementary strand thereto; is a portion of the polynucleotide sequence encoding the polypeptide encoded by the cDNA contained in Clone ID NO:Z or the complementary strand thereto; is a portion of a polynucleotide sequence encoding the amino acid sequence encoded by the region of SEQ ID NO:X as defined in columns 8 and 9 of Table 2 or the complementary strand thereto; is a portion of the polynucleotide sequence of SEQ ID NO:X as defined in columns 8 and 9 of Table 2 or the complementary strand thereto; is a portion of the polynucleotide sequence in SEQ ID NO:X or the complementary strand thereto; is a polynucleotide sequence encoding a portion of the polypeptide of SEQ ID NO:Y; is a polynucleotide sequence encoding a portion of a polypeptide encoded by SEQ ID NO:X; is a polynucleotide sequence encoding a portion of a potypeptide encoded by the complement of the polynucleotide sequence in SEQ ID NO:X; is a portion of a polynucleotide sequence encoding the amino acid sequence encoded by the region of SEQ ID NO:B as defined in column 6 of Table 1B or the complementary strand thereto; or is a portion of the polynucleotide sequence of SEQ ID NO:B as defined in column 6 of Table 1B or the complementary strand thereto.

[0134] The polynucleotide fragments of the invention are preferably at least about 15 nt, and more preferably at least about 20 nt, still more preferably at least about 30 nt, and even more preferably, at least about 40 nt, at least about 50 nt, at least about 75 nt, or at least about 150 nt in length. A fragment “at least 20 nt in length,” for example, is intended to include 20 or more contiguous bases from the cDNA sequence contained in Clone ID NO:Z, or the nucleotide sequence shown in SEQ ID NO:X or the complementary stand thereto. In this context “about” includes the particularly recited value or a value larger or smaller by several (5, 4, 3, 2, or 1) nucleotides, at either terminus or at both termini. These nucleotide fragments have uses that include, but are not limited to, as diagnostic probes and primers as discussed herein. Of course, larger fragments (e.g., at least 160, 170, 180, 190, 200, 250, 500, 600, 1000, or 2000 nucleotides in length) are also encompassed by the invention.

[0135] Moreover, representative examples of polynucleotide fragments of the invention, comprise, or alternatively consist of, a sequence from about nucleotide number 1-50, 51-100, 101-150, 151-200, 201-250, 251-300, 301-350, 351-400, 401-450, 451-500, 501-550, 551-600, 651-700, 701-750, 751-800, 800-850, 851-900, 901-950, 951-1000, 1001-1050, 1051-1100, 1101-1150, 1151-1200, 1201-1250, 1251-1300, 1301-1350, 1351-1400, 1401-1450, 1451-1500, 1501-1550, 1551-1600, 1601-1650, 1651-1700, 1701-1750, 1751-1800, 1801-1850, 1851-1900, 1901-1950, 1951-2000, 2001-2050, 2051-2100, 2101-2150, 2151-2200, 2201-2250, 2251-2300, 2301-2350, 2351-2400, 2401-2450, 2451-2500, 2501-2550, 2551-2600, 2601-2650, 2651-2700, 2701-2750, 2751-2800, 2801-2850, 2851-2900, 2901-2950, 2951-3000, 3001-3050, 3051-3100, 3101-3150, 3151-3200, 3201-3250, 3251-3300, 3301-3350, 3351-3400, 3401-3450, 3451-3500, 3501-3550, 3551-3600, 3601-3650, 3651-3700, 3701-3750, 3751-3800, 3801-3850, 3851-3900, 3901-3950, 3951-4000, 4001-4050, 4051-4100, 4101-4150, 4151-4200, 4201-4250, 4251-4300, 4301-4350, 4351-4400, 4401-4450, 4451-4500, 4501-4550, 4551-4600, 4601-4650, 4651-4700, 4701-4750, 4751-4800, 4801-4850, 4851-4900, 4901-4950, 4951-5000, 5001-5050, 5051-5100, 5101-5150, 5151-5200, 5201-5250, 525-1-5300, 5301-5350, 5351-5400, 5401-5450, 5451-5500, 5501-5550, 5551-5600, 5601-5650, 5651-5700, 5701-5750, 5751-5800, 5801-5850, 5851-5900, 5901-5950, 5951-6000, 6001-6050, 6051-6100, 6101-6150, 6151-6200, 6201-6250, 6251-6300, 6301-6350, 6351-6400, 6401-6450, 6451-6500, 6501-6550, 6551-6600, 6601-6650, 6651-6700, 6701-6750, 6751-6800, 6801-6850, 6851-6900, 6901-6950, 6951-7000, 7001-7050, 7051-7100, 7101-7150, 7151-7200, 7201-7250, 7251-7300 or 7301 to the end of SEQ ID NO:X, or the complementary strand thereto. In this context “about” includes the particularly recited range or a range larger or smaller by several (5, 4, 3, 2, or 1) nucleotides, at either terminus or at both termini. Preferably, these fragments encode a polypeptide which has a functional activity (e.g., biological activity). More preferably, these polynucleotides can be used as probes or primers as discussed herein. Polynucleotides which hybridize to one or more of these polynucleotides under stringent hybridization conditions or alternatively, under lower stringency conditions are also encompassed by the invention, as are polypeptides encoded by these polynucleotides.

[0136] Further representative examples of polynucleotide fragments of the invention, comprise, or alternatively consist of, a sequence from about nucleotide number 1-50, 51-100, 101-150, 151-200, 201-250, 251-300, 301-350, 351-400, 401-450, 451-500, 501-550, 551-600, 651-700, 701-750, 751-800, 800-850, 851-900, 901-950, 951-1000, 1001-1050, 1051-1100, 1101-1150, 1151-1200, 1201-1250, 1251-1300, 1301-1350, 1351-1400, 1401-1450, 1451-1500, 1501-1550, 1551-1600, 1601-1650, 1651-1700, 1701-1750, 1751-1800, 1801-1850, 1851-1900, 1901-1950, 1951-2000, 2001-2050, 2051-2100, 2101-2150, 2151-2200, 2201-2250, 2251-2300, 2301-2350, 2351-2400, 2401-2450, 2451-2500, 2501-2550, 2551-2600, 2601-2650, 2651-2700, 2701-2750, 2751-2800, 2801-2850, 2851-2900, 2901-2950, 2951-3000, 3001-3050, 3051-3100, 3101-3150, 3151-3200, 3201-3250, 3251-3300, 3301-3350, 3351-3400, 3401-3450, 3451-3500, 3501-3550, 3551-3600, 3601-3650, 3651-3700, 3701-3750, 3751-3800, 3801-3850, 3851-3900, 3901-3950, 3951-4000, 4001-4050, 4051-4100, 4101-4150, 4151-4200, 4201-4250, 4251-4300, 4301-4350, 4351-4400, 4401-4450, 4451-4500, 4501-4550, 4551-4600, 4601-4650, 4651-4700, 4701-4750, 4751-4800, 4801-4850, 4851-4900, 4901-4950, 4951-5000, 5001-5050, 5051-5100, 5101-5150, 5151-5200, 5201-5250, 5251-5300, 5301-5350, 5351-5400, 5401-5450, 5451-5500, 5501-5550, 5551-5600, 5601-5650, 5651-5700, 5701-5750, 5751-5800, 5801-5850, 5851-5900, 5901-5950, 5951-0.6000, 6001-6050, 6051-6100, 6101-6150, 6151-6200, 6201-6250, 6251-6300, 6301-6350, 6351-6400, 6401-6450, 6451-6500, 6501-6550, 6551-6600, 6601-6650, 6651-6700, 6701-6750, 6751-6800, 6801-6850, 6851-6900, 6901-6950, 6951-7000, 7001-7050, 7051-7100, 7101-7150, 7151-7200, 7201-7250, 7251-7300 or 7301 to the end of the cDNA sequence contained in Clone ID NO:Z, or the complementary strand thereto. In this context “about” includes the particularly recited range or a range larger or smaller by several (5, 4, 3, 2, or 1) nucleotides, at either terminus or at both termini. Preferably, these fragments encode a polypeptide which has a functional activity (e.g., biological activity). More preferably, these polynucleotides can be used as probes or primers as discussed herein. Polynucleotides which hybridize to one or more of these polynucleotides under stringent hybridization conditions or alternatively, under lower stringency conditions are also encompassed by the invention, as are polypeptides encoded by these polynucleotides.

[0137] Moreover, representative examples of polynucleotide fragments of the invention comprise, or alternatively consist of, a nucleic acid sequence comprising one, two, three, four, five, six, seven, eight, nine, ten, or more of the above described polynucleotide fragments of the invention in combination with a polynucleotide sequence delineated in Table 1B column 6. Additional, representative examples of polynucleotide fragments of the invention comprise, or alternatively consist of, a nucleic acid sequence comprising one, two, three, four, five, six, seven, eight, nine, ten, or more of the above described polynucleotide fragments of the invention in combination with a polynucleotide sequence that is the complementary strand of a sequence delineated in column 6 of Table 1B. In further embodiments, the above-described polynucleotide fragments of the invention comprise, or alternatively consist of, sequences delineated in Table 1B, column 6, and have a nucleic acid sequence which is different from that of the BAC fragment having the sequence disclosed in SEQ ID NO:B (see Table 1B, column 5). In additional embodiments, the above-described polynucleotide fragments of the invention comprise, or alternatively consist of, sequences delineated in Table 1B, column 6, and have a nucleic acid sequence which is different from that published for the BAC clone identified as BAC ID NO:A (see Table 1B, column 4). In additional embodiments, the above-described polynucleotides of the invention comprise, or alternatively consist of, sequences delineated Table 1B, column 6, and have a nucleic acid sequence which is different from that contained in the BAC clone identified as BAC ID NO:A (see Table 1B, column 4). Polypeptides encoded by these polynucleotides, other polynucleotides that encode these polypeptides, and antibodies that bind these polypeptides are also encompassed by the invention. Additionally, fragments and variants of the above-described polynucleotides and polypeptides are also encompassed by the invention.

[0138] In additional specific embodiments, polynucleotides of the invention comprise, or alternatively consist of, one, two, three, four, five, six, seven, eight, nine, ten, or more fragments of the sequences delineated in column 6 of Table 1B, and the polynucleotide sequence of SEQ ID NO:X (e.g., as defined in Table 1B, column 2) or fragments or variants thereof. Polypeptides encoded by these polynucleotides, other polynucleotides that encode these polypeptides, and antibodies that bind these polypeptides are also encompassed by the invention.

[0139] In additional specific embodiments, polynucleotides of the invention comprise, or alternatively consist of, one, two, three, four, five, six, seven, eight, nine, ten, or more fragments of the sequences delineated in column 6 of Table 1B which correspond to the same Clone ID NO:Z (see Table 1B, column 1), and the polynucleotide sequence of SEQ ID NO:X (e.g., as defined in Table 1A or 1B) or fragments or variants thereof. Polypeptides encoded by these polynucleotides, other polynucleotides that encode these polypeptides, and antibodies that bind these polypeptides are also encompassed by the invention.

[0140] In further specific embodiments, polynucleotides of the invention comprise, or alternatively consist of, one, two, three, four, five, six, seven, eight, nine, ten, or more fragments of the sequences delineated in the same-row of column 6 of Table 1B, and the polynucleotide sequence of SEQ ID NO:X (e.g., as defined in Table 1A or 1B) or fragments or variants thereof. Polypeptides encoded by these polynucleotides, other polynucleotides that encode these polypeptides, and antibodies that bind these polypeptides are also encompassed by the invention.

[0141] In additional specific embodiments, polynucleotides of the invention comprise, or alternatively consist of a polynucleotide sequence in which the 3′ 10 polynucleotides of one of the sequences delineated in column 6 of Table 1B and the 5′ 10 polynucleotides of the sequence of SEQ ID NO:X are directly contiguous. Nucleic acids which hybridize to the complement of these 20 contiguous polynucleotides under stringent hybridization conditions or alternatively, under lower stringency conditions, are also encompassed by the invention. Polypeptides encoded by these polynucleotides and/or nucleic acids, other polynucleotides and/or nucleic acids that encode these polypeptides, and antibodies that bind these polypeptides are also encompassed by the invention. Additionally, fragments and variants of the above described polynucleotides, nucleic acids, and polypeptides are also encompassed by the invention.

[0142] In additional specific embodiments, polynucleotides of the invention comprise, or alternatively consist of a polynucleotide sequence in which the 3′ 10 polynucleotides of one of the sequences delineated in column 6 of Table 1B and the 5′ 10 polynucleotides of a fragment or variant of the sequence of SEQ ID NO:X (e.g., as described herein) are directly contiguous Nucleic acids which hybridize to the complement of these 20 contiguous polynucleotides under stringent hybridization conditions or alternatively, under lower stringency conditions, are also encompassed by the invention. Polypeptides encoded by these polynucleotides and/or nucleic acids, other polynucleotides and/or nucleic acids encoding these polypeptides, and antibodies that bind these polypeptides are also encompassed by the invention. Additionally, fragments and variants of the above-described polynucleotides, nucleic acids, and polypeptides are also encompassed by the invention.

[0143] In further specific embodiments, polynucleotides of the invention comprise, or alternatively consist of a polynucleotide sequence in which the 3′ 10 polynucleotides of a fragment or variant of the sequence of SEQ ID NO:X and the 5′ 10 polynucleotides of the sequence of one of the sequences delineated in column 6 of Table 1B are directly contiguous. Nucleic acids which hybridize to the complement of these 20 contiguous polynucleotides under stringent hybridization conditions or alternatively, under lower stringency conditions, are also encompassed by the invention. Polypeptides encoded by these polynucleotides and/or nucleic acids, other polynucleotides and/or nucleic acids encoding these polypeptides, and antibodies that bind these polypeptides are also encompassed by the invention. Additionally, fragments and variants of the above-described polynucleotides, nucleic acids, and polypeptides are also encompassed by the invention.

[0144] In specific embodiments, polynucleotides of the invention comprise, or alternatively consist of a polynucleotide sequence in which the 3′ 10 polynucleotides of one of the sequences delineated in column 6 of Table 1B and the 5′ 10 polynucicotides of another sequence in column 6 are directly contiguous. In preferred embodiments, the 3′ 10 polynucleotides of one of the sequences delineated in column 6 of Table 1B is directly contiguous with the 5′ 10 polynucleotides of the next sequential exon delineated in Table 1B, column 6. Nucleic acids which hybridize to the complement of these 20 contiguous polynucleotides under stringent hybridization conditions or alternatively, under lower stringency conditions, are also encompassed by the invention. Polypeptides encoded by these polynucleotides and/or nucleic acids, other polynucleotides and/or nucleic acids encoding these polypeptides, and antibodies that bind these polypeptides are also encompassed by the invention. Additionally, fragments and variants of the above-described polynucleotides, nucleic acids, and polypeptides are also encompassed by the invention.

[0145] In the present invention, a “polypeptide fragment” refers to an amino acid sequence which is a portion of that contained in SEQ ID NO:Y, a portion of an amino acid sequence encoded by the portion of SEQ ID NO:X as defined in columns 8 and 9 of Table 2, a portion of an amino acid sequence encoded by the polynucleotide sequence of SEQ ID NO:X, a portion of an amino acid sequence encoded by the complement of the polynucleotide sequence in SEQ ID NO:X, and/or a portion of an amino acid sequence encoded by the cDNA contained in Clone ID NO:Z. Protein (polypeptide) fragments may be “free-standing,” or comprised within a larger polypeptide of which the fragment forms a part or region, most preferably as a single continuous region. Representative examples of polypeptide fragments of the invention, include, for example, fragments comprising, or alternatively consisting of, from about amino acid number 1-20, 21-40, 41-60, 61-80, 81-100, 102-120, 121-140, 141-160, 161-180, 181-200, 201-220, 221-240, 241-260, 261-280, 281-300, 301-320, 321-340, 341-360, 361-380, 381-400, 401-420, 421-440, 441-460, 461-480, 481-500, -501-520, 521-540, 541-560, 561-580, 581-600, 601-620, 621-640, 641-660, 661-680, 681-700, 701-720, 721-740, 741-760, 761-780, 781-800, 801-820, 821-840, 841-860, 861-880, 881-900, 901-920, 921-940, 941-960, 961-980, 981-1000, 1001-1020, 1021-1040, 1041-1060, 1061-1080, 1081-1100, 1101-1120, 1121-1140, 1141-1160, 1161-1180, 1181-1200, 1201-1220, 1221-1240, 1241-1260, 1261-1280, 1281-1300, 1301-1320, 1321-1340, 1341-1360, 1361-1380, 1381-1400, 1401-1420, 1421-1440, or 1441 to the end of the coding region. In a preferred embodiment, polypeptide fragments of the invention include, for example, fragments comprising, or alternatively consisting of, from about amino acid number 1-20, 21-40, 41-60, 61-80, 81-100, 102-120, 121-140, 141-160, 161-180, 181-200, 201-220, 221-240, 241-260, 261-280, 281-300, 301-320, 321-340, 341-360, 361-380, 381-400, 401-420, 421-440, 441-460, 461-480, 481-500, 501-520, 521-540, 541-560, 561-580, 581-600, 601-620, 621-640, 641-660, 661-680, 681-700, 701-720, 721-740, 741-760, 761-780, 781-800, 801-820, 821-840, 841-860, 861-880, 881-900, 901-920, 921-940, 941-960, 961-980, 981-1000, 1001-1020, 1021-1040, 1041-1060, 1061-1080, 1081-1100, 1101-1120, 1121-1140, 1141-1160, 1161-1180, 1181-1200, 1201-1220, 1221-1240, 1241-1260, 1261-1280, 1281-1300, 1301-1320, 1321-1340, 1341-1360, 1361-1380, 1381-1400, 1401-1420, 1421-1440, or 1441 to the end of the coding region of SEQ ID NO:Y. Moreover, polypeptide fragments of the invention may be at least about 10, 15, 20, 25, 30, 35, 40, 45, 50, 55, 60, 65, 70, 75, 80, 85, 90, 100, 110, 120, 130, 140, or 150 amino acids in length. In this context “about” includes the particularly recited ranges or values, or ranges or values larger or smaller by several (5, 4, 3, 2, or 1) amino acids, at either extreme or at both extremes. Polynucleotides encoding these polypeptide fragments are also encompassed by the invention.

[0146] Even if deletion of one or more amino acids from the N-terminus of a protein results in modification of loss of one or more biological functions of the protein, other functional activities (e.g., biological activities, ability to multimerize, ability to bind a ligand) may still be retained. For example, the ability of shortened muteins to induce and/or bind to antibodies which recognize the complete or mature forms of the polypeptides generally will be retained when less than the majority of the residues of the complete or mature polypeptide are removed from the N-terminus. Whether a particular polypeptide lacking N-terminal residues of a complete polypeptide retains such immunologic activities can readily be determined by routine methods described herein and otherwise known in the art. It is not unlikely that a mutein with a large number of deleted N-terminal amino acid residues may retain some biological or immunogenic activities. In fact, peptides composed of as few as six amino acid residues may often evoke an immune response.

[0147] Accordingly, polypeptide fragments include the secreted protein as well as the mature form. Further preferred polypeptide fragments include the secreted protein or the mature form having a continuous series of deleted residues from the amino or the carboxy terminus, or both. For example, any number of amino acids, ranging from 1-60, can be deleted from the amino terminus of either the secreted polypeptide or the mature form. Similarly, any number of amino acids, ranging from 1-30, can be deleted from the carboxy terminus of the secreted protein or mature form. Furthermore, any combination of the above amino and carboxy terminus deletions is preferred. Similarly, polynucleotides encoding these polypeptide fragments are also preferred.

[0148] The present invention further provides polypeptides having one or more residues deleted from the amino terminus of the amino acid sequence of a polypeptide disclosed herein (e.g., a polypeptide of SEQ ID NO:Y, a polypeptide encoded by the polynucleotide sequence contained in SEQ ID NO:X or the complement thereof, a polypeptide encoded by the portion of SEQ ID NO:X as defined in columns 8 and 9 of Table 2, a polypeptide encoded by the portion of SEQ ID NO:B as defined in column 6 of Table 1B, and/or a polypeptide encoded by the cDNA contained in Clone ID NO:Z). In particular, N-terminal deletions may be described by the general formula m-q, where q is a whole integer representing the total number of amino acid residues in a polypeptide of the invention (e.g., the polypeptide disclosed in SEQ ID NO:Y, or the polypeptide encoded by the portion of SEQ ID NO:X as defined in columns 8 and 9 of Table 2), and m is defined as any integer ranging from 2 to q-6. Polynucleotides encoding these polypeptides are also encompassed by the invention.

[0149] The present invention further provides polypeptides having one or more residues from the carboxy terminus of the amino acid sequence of a polypeptide disclosed herein (e.g., a polypeptide of SEQ ID NO:Y, a polypeptide encoded by the polynucleotide sequence contained in SEQ ID NO:X, a polypeptide encoded by the portion of SEQ ID NO:X as defined in columns 8 and 9 of Table 2, and/or a polypeptide encoded by the cDNA contained in Clone ID NO:Z). In particular, C-terminal deletions may be described by the general formula 1-n, where n is any whole integer ranging from 6 to q-1, and where n corresponds to the position of amino acid residue in a polypeptide of the invention. Polynucleotides encoding these polypeptides are also encompassed by the invention.

[0150] In addition, any of the above described N- or C-terminal deletions can be combined to produce a N- and C-terminal deleted polypeptide. The invention also provides polypeptides having one or more amino acids deleted from both the amino and the carboxyl termini, which may be described generally as having residues m-n of a polypeptide encoded by SEQ ID NO:X (e.g., including, but not limited to, the preferred polypeptide disclosed as SEQ ID NO:Y and the polypeptide encoded by the portion of SEQ ID NO:X as defined in columns 8 and 9 of Table 2), the cDNA contained in Clone ID NO:Z, and/or the complement thereof, where n and m are integers as described above. Polynucleotides encoding these polypeptides are also encompassed by the invention.

[0151] Also as mentioned above, even if deletion of one or more amino acids from the C-terminus of a protein results in modification of loss of one or more biological functions of the protein, other functional activities (e.g., biological activities, ability to multimerize, ability to bind a ligand) may still be retained. For example the ability of the shortened mutein to induce and/or bind to antibodies which recognize the complete or mature forms of the polypeptide generally will be retained when less than the majority of the residues of the complete or mature polypeptide are removed from the C-terminus. Whether a particular polypeptide lacking C-terminal residues of a complete polypeptide retains such immunologic activities can readily be determined by routine methods described herein and otherwise known in the art. It is not unlikely that a mutein with a large number of deleted C-terminal amino acid residues may retain some biological or immunogenic activities. In fact, peptides composed of as few as six amino acid residues may often evoke an immune response.

[0152] The present application is also directed to proteins containing polypeptides at least 80%, 85%, 90%, 95%, 96%, 97%, 98% or 99% identical to a polypeptide sequence set forth herein. In preferred embodiments, the application is directed to proteins containing polypeptides at least 80%, 85%, 90%, 95%, 96%, 97%, 98% or 99% identical to polypeptides having the amino acid sequence of the specific N- and C-terminal deletions. Polynucleotides encoding these polypeptides are also encompassed by the invention.

[0153] Any polypeptide sequence encoded by, for example, the polynucleotide sequences set forth as SEQ ID NO:X or the complement thereof, (presented, for example, in Tables 1AA and 2), the cDNA contained in Clone ID NO:Z, or the polynucleotide sequence as defined in column 6 of Table 1B, may be analyzed to determine certain preferred regions of the polypeptide. For example, the amino acid sequence of a polypeptide encoded by a polynucleotide sequence of SEQ ID NO:X (e.g., the polypeptide of SEQ ID NO:Y and the polypeptide encoded by the portion of SEQ ID NO:X as defined in columns 8 and 9 of Table 2) or the cDNA contained in Clone ID NO:Z may be analyzed using the default parameters of the DNASTAR computer algorithm (DNASTAR, Inc., 1228 S. Park St., Madison, Wis. 53715 USA; http://www.dnastar.com/).

[0154] Polypeptide regions that may be routinely obtained using the DNASTAR computer algorithm include, but are not limited to, Garnier-Robson alpha-regions, beta-regions, turn-regions, and coil-regions; Chou-Fasman alpha-regions, beta-regions, and turn-regions; Kyte-Doolittle hydrophilic regions and hydrophobic regions; Eisenberg alpha- and beta-amphipathic regions; Karplus-Schulz flexible regions; Emini surface-forming regions; and Jameson-Wolf regions of high antigenic index. Among highly preferred polynucleotides of the invention in this regard are those that encode polypeptides comprising regions that combine several structural features, such as several (e.g., 1, 2, 3 or 4) of the features set out above.

[0155] Additionally, Kyte-Doolittle hydrophilic regions and hydrophobic regions, Emini surface-forming regions, and Jameson-Wolf regions of high antigenic index (i.e., containing four or more contiguous amino acids having an antigenic index of greater than or equal to 1.5, as identified using the default parameters of the Jameson-Wolf program) can routinely be used to determine polypeptide regions that exhibit a high degree of potential for antigenicity. Regions of high antigenicity are determined from data by DNASTAR analysis by choosing values which represent regions of the polypeptide which are likely to be exposed on the surface of the polypeptide in an environment in which antigen recognition may occur in the process of initiation of an immune response.

[0156] Preferred polypeptide fragments of the invention are fragments comprising, or alternatively, consisting of, an amino acid sequence that displays a functional activity (e.g. biological activity) of the polypeptide sequence of which the amino acid sequence is a fragment. By a polypeptide displaying a “functional activity” is meant a polypeptide capable of one or more known functional activities associated with a full-length protein, such as, for example, biological activity, antigenicity, immunogenicity, and/or multimerization, as described herein.

[0157] Other preferred polypeptide fragments are biologically active fragments. Biologically active fragments are those exhibiting activity similar, but not necessarily identical, to an activity of the polypeptide of the present invention. The biological activity of the fragments may include an improved desired activity, or a decreased undesirable activity.

[0158] In preferred embodiments, polypeptides of the invention comprise, or alternatively consist of, one, two, three, four, five or more of the antigenic fragments of the polypeptide of SEQ ID NO:Y, or portions thereof. Polynucleotides encoding these polypeptides are also encompassed by the invention.

[0159] The present invention encompasses polypeptides comprising, or alternatively consisting of, an epitope of: the polypeptide sequence shown in SEQ ID NO:Y; a polypeptide sequence encoded by SEQ ID NO:X or the complementary strand thereto; the polypeptide sequence encoded by the portion of SEQ ID NO:X as defined in columns 8 and 9 of Table 2; the polypeptide sequence encoded by the portion of SEQ ID NO:B as defined in column 6 of Table 1B or the complement thereto; the polypeptide sequence encoded by the cDNA contained in Clone ID NO:Z; or the polypeptide sequence encoded by a polynucleotide that hybridizes to the sequence of SEQ ID NO:X, the complement of the sequence of SEQ ID NO:X, the complement of a portion of SEQ ID NO:X as defined in columns 8 and 9 of Table 2, or the cDNA sequence contained in Clone ID NO:Z under stringent hybridization conditions or alternatively, under lower stringency hybridization as defined supra. The present invention further encompasses polynucleotide sequences encoding an epitope of a polypeptide sequence of the invention (such as, for example, the sequence disclosed in SEQ ID NO:X, or a fragment thereof), polynucleotide sequences of the complementary strand, of a polynucleotide sequence encoding an epitope of the invention, and polynucleotide sequences which hybridize to the complementary strand under stringent hybridization conditions or alternatively, under lower stringency hybridization conditions defined supra.

[0160] The term “epitopes,” as used herein, refers to portions of a polypeptide having antigenic or immunogenic activity in an animal, preferably a mammal, and most preferably in a human. In a preferred embodiment, the present invention encompasses a polypeptide comprising an epitope, as well as the polynucleotide encoding this polypeptide. An “immunogenic epitope,” as used herein, is defined as a portion of a protein that elicits an antibody response in an animal, as determined by any method known in the art, for example, by the methods for generating antibodies described infra. (See, for example, Geysen et al., Proc. Natl. Acad. Sci. USA 81:3998-4002 (1983)). The term “antigenic epitope,” as used herein, is defined as a portion of a protein to which an antibody can immunospecifically bind its antigen as determined by any method well known in the art, for example, by the immunoassays described herein. Immunospecific binding excludes non-specific binding but does not necessarily exclude cross-reactivity with other antigens. Antigenic epitopes need not necessarily be immunogenic.

[0161] Fragments which function as epitopes may be produced by any conventional means. (See, e.g., Houghten, R. A., Proc. Natl. Acad. Sci. USA 82:5131-5135 (1985) further described in U.S. Pat. No. 4,631,211.)

[0162] In the present invention, antigenic epitopes preferably contain a sequence of at least 4, at least 5, at least 6, at least 7, more preferably at least 8, at least 9, at least 10, at least 11, at least 12, at least 13, at least 14, at least 15, at least 20, at least 25, at least 30, at least 40, at least 50, and, most preferably, between about 15 to about 30 amino acids. Preferred polypeptides comprising immunogenic or antigenic epitopes are at least 10, 15, 20, 25, 30, 35, 40, 45, 50, 55, 60, 65, 70, 75, 80, 85, 90, 95, or 100 amino acid residues in length. Additional non-exclusive preferred antigenic epitopes include the antigenic epitopes disclosed herein, as well as portions thereof. Antigenic epitopes are useful, for example, to raise antibodies, including monoclonal antibodies, that specifically bind the epitope. Preferred antigenic epitopes include the antigenic epitopes disclosed herein, as well as any combination of two, three, four, five or more of these antigenic epitopes. Antigenic epitopes can be used as the target molecules in immunoassays. (See, for instance, Wilson et al., Cell 37:767-778 (1984); Sutcliffe et al., Science 219:660-666 (1983)).

[0163] Non-limiting examples of epitopes of polypeptides that can be used to generate antibodies of the invention include a polypeptide comprising, or alternatively consisting of, at least one, two, three, four, five, six or more of the portion(s) of SEQ ID NO:Y specified in column 6 of Table 1A. These polypeptide fragments have been determined to bear antigenic epitopes of the proteins of the invention by the analysis of the Jameson-Wolf antigenic index, which is included in the DNAStar suite of computer programs. By “comprise” it is intended that a polypeptide contains at least one, two, three, four, five, six or more of the portion(s) of SEQ ID NO:Y shown in column 6 of Table 1A, but it may contain additional flanking residues on either the amino or carboxyl termini of the recited portion. Such additional flanking sequences are preferably sequences naturally found adjacent to the portion; i.e., contiguous sequence shown in SEQ ID NO:Y. The flanking sequence may, however, be sequences from a heterologous polypeptide, such as from another protein described herein or from a heterologous polypeptide not described herein. In particular embodiments, epitope portions of a polypeptide of the invention comprise one, two, three, or more of the portions of SEQ ID NO:Y shown in column 6 of Table 1A. Polynucleotides encoding these polypeptides are also encompassed by the invention.

[0164] Similarly, immunogenic epitopes can be used, for example, to induce antibodies according to methods well known in the art. See, for instance, Sutcliffe et al., supra; Wilson et al., supra; Chow et al., Proc. Natl. Acad. Sci. USA 82:910-914; and Bittle et al., J. Gen. Virol. 66:2347-2354 (1985). Preferred immunogenic epitopes include the immunogenic epitopes disclosed herein, as well as any combination of two, three, four, five or more of these immunogenic epitopes. The polypeptides comprising one or more immunogenic epitopes may be presented for eliciting an antibody response together with a carrier protein, such as an albumin, to an animal system (such as rabbit or mouse), or, if the polypeptide is of sufficient length (at least about 25 amino acids), the polypeptide may be presented without a carrier. However, immunogenic epitopes comprising as few as 8 to 10 amino acids have been shown to be sufficient to raise antibodies capable of binding to, at the very least, linear epitopes in a denatured polypeptide (e.g., in Western blotting).

[0165] Epitope-bearing polypeptides of the present invention may be used to induce antibodies according to methods well known in the art including, but not limited to, in vivo immunization, in vitro immunization, and phage display methods. See, e.g., Sutcliffe et al., supra; Wilson et al., supra, and Bittle et al., J. Gen. Virol.; 66:2347-2354 (1985). If in vivo immunization is used, animals may be immunized with free peptide; however, anti-peptide antibody titer may be boosted by coupling the peptide to a macromolecular carrier, such as keyhole limpet hemacyanin (KLH) or tetanus toxoid. For instance, peptides containing cysteine residues may be coupled to a carrier using a linker such as maleimidobenzoyl-N-hydroxysuccinimide ester (MBS), while other peptides may be coupled to carriers using a more general linking agent such as glutaraldehyde. Animals such as rabbits, rats and mice are immunized with either free or carrier-coupled peptides, for instance, by intraperitoneal and/or intradermal injection of emulsions containing about 100 μg of peptide or carrier protein and Freund's adjuvant or any other adjuvant known for stimulating an immune response. Several booster injections may be needed, for instance, at intervals of about two weeks, to provide a useful titer of anti-peptide antibody which can be detected, for example, by ELISA assay using free peptide adsorbed to a solid surface. The titer of anti-peptide antibodies in serum from an immunized animal may be increased by selection of anti-peptide antibodies, for instance, by adsorption to the peptide on a solid support and elution of the selected antibodies according to methods well known in the art.

[0166] As one of skill in the art will appreciate, and as discussed above, the polypeptides of the present invention (e.g., those comprising an immunogenic or antigenic epitope) can be fused to heterologous polypeptide sequences. For example, polypeptides of the present invention (including fragments or variants thereof), may be fused with the constant domain of immunoglobulins (IgA, IgE, IgG, IgM), or portions thereof (CH1, CH2, CH3, or any combination thereof and portions thereof, resulting in chimeric polypeptides. By way of another non-limiting example, polypeptides and/or antibodies of the present invention (including fragments or variants thereof) may be fused with albumin (including but not limited to recombinant human serum albumin or fragments or variants thereof (see, e.g., U.S. Pat. No. 5,876,969, issued Mar. 2, 1999, EP Patent 0 413 622, and U.S. Pat. No. 5,766,883, issued Jun. 16, 1998, herein incorporated by reference in their entirety)). In a preferred embodiment, polypeptides and/or antibodies of the present invention (including fragments or variants thereof) are fused with the mature form of human serum albumin (i.e., amino acids 1-585 of human serum albumin as shown in FIGS. 1 and 2 of EP Patent 0 322 094) which is herein incorporated by reference in its entirety. In another preferred embodiment, polypeptides and/or antibodies of the present invention (including fragments or variants thereof) are fused with polypeptide fragments comprising, or alternatively consisting of, amino acid residues 1-z of human serum albumin, where z is an integer from 369 to 419, as described in U.S. Pat. No. 5,766,883 herein incorporated by reference in its entirety. Polypeptides and/or antibodies of the present invention (including fragments or variants thereof) may be fused to either the N- or C-terminal end of the heterologous protein (e.g., immunoglobulin Fc polypeptide or human serum albumin polypeptide). Polynucleotides encoding fusion proteins of the invention are also encompassed by the invention.

[0167] Such fusion proteins as those described above may facilitate purification and may increase half-life in vivo. This has been shown for chimeric proteins consisting of the first two domains of the human CD4-polypeptide and various domains of the constant regions of the heavy or light chains of mammalian immunoglobulins. See, e.g., EP 394,827; Traunecker et al., Nature, 331:84-86 (1988). Enhanced delivery of an antigen across the epithelial barrier to the immune system has been demonstrated for antigens (e.g., insulin) conjugated to an FcRn binding partner such as IgG or Fc fragments (see, e.g., PCT Publications WO 96/22024 and WO 99/04813). IgG Fusion proteins that have a disulfide-linked dimeric structure due to the IgG portion desulfide bonds have also been found to be more efficient in binding and neutralizing other molecules than monomeric polypeptides or fragments thereof alone. See, e.g., Fountoulakis et al., J. Biochem., 270:3958-3964 (1995). Nucleic acids encoding the above epitopes can also be recombined with a gene of interest as an epitope tag (e.g., the hemagglutinin (HA) tag or flag tag) to aid in detection and purification of the expressed polypeptide. For example, a system described by Janknecht et al. allows for the ready purification of non-denatured fusion proteins expressed in human cell lines (Janknecht et al., 1991, Proc. Natl. Acad. Sci. USA 88:8972-897). In this system, the gene of interest is subcloned into a vaccinia recombination plasmid such that the open reading frame of the gene is translationally fused to an amino-terminal tag consisting of six histidine residues. The tag serves as a matrix binding domain for the fusion protein. Extracts from cells infected with the recombinant vaccinia virus are loaded onto Ni2+ nitriloacetic acid-agarose column and histidine-tagged proteins can be selectively eluted with imidazole-containing buffers.

[0168] Fusion Proteins

[0169] Any polypeptide of the present invention can be used to generate fusion proteins. For example, the polypeptide of the present invention, when fused to a second protein, can be used as an antigenic tag. Antibodies raised against the polypeptide of the present invention can be used to indirectly detect the second protein by binding to the polypeptide. Moreover, because secreted proteins target cellular locations based on trafficking signals, polypeptides of the present invention which are shown to be secreted can be used as targeting molecules once fused to other proteins.

[0170] Examples of domains that can be fused to polypeptides of the present invention include not only heterologous signal sequences, but also other heterologous functional regions. The fusion does not necessarily need to be direct, but may occur through linker sequences.

[0171] In certain preferred embodiments, proteins of the invention are fusion proteins comprising an amino acid sequence that is an N and/or C-terminal deletion of a polypeptide of the invention. In preferred embodiments, the invention is directed to a fusion protein comprising an amino acid sequence that is at least 80%, 85%, 90%, 95%, 96%, 97%, 98% or 99% identical to a polypeptide sequence of the invention. Polynucleotides encoding these proteins are also encompassed by the invention.

[0172] Moreover, fusion proteins may also be engineered to improve characteristics of the polypeptide of the present invention. For instance, a region of additional amino acids, particularly charged amino acids, may be added to the N-terminus of the polypeptide to improve stability and persistence during purification from the host cell or subsequent handling and storage. Also, peptide moieties may be added to the polypeptide to facilitate purification. Such regions may be removed prior to final preparation of the polypeptide. The addition of peptide moieties to facilitate handling of polypeptides are familiar and routine techniques in the art.

[0173] As one of skill in the art will appreciate that, as discussed above, polypeptides of the present invention, and epitope-bearing fragments thereof, can be combined with heterologous polypeptide sequences. For example, the polypeptides of the present invention may be fused with heterologous polypeptide sequences, for example, the polypeptides of the present invention may be fused with the constant domain of immunoglobulins (IgA, IgE, IgG, IgM) or portions thereof (CH1, CH2, CH3, and any combination thereof, including both entire domains and portions thereof), or albumin (including, but not limited to, native or recombinant human albumin or fragments or variants thereof (see, e.g., U.S. Pat. No. 5,876,969, issued Mar. 2, 1999, EP Patent 0 413 622, and U.S. Pat. No. 5,766,883, issued Jun. 16, 1998, herein incorporated by reference in their entirety)), resulting in chimeric polypeptides. For example, EP-A-O 464 533 (Canadian counterpart 2045869) discloses fusion proteins comprising various portions of constant region of immunoglobulin molecules together with another human protein or part thereof. In many cases, the Fc part in a fusion protein is beneficial in therapy and diagnosis, and thus can result in, for example, improved pharmacokinetic properties (EP-A 0232 262). Alternatively, deleting the Fc part after the fusion protein has been expressed, detected, and purified, would be desired. For example, the Fc portion may hinder therapy and diagnosis if the fusion protein is used as an antigen for immunizations. In drug discovery, for example, human proteins, such as hIL-5, have been fused with Fc portions for the purpose of high-throughput screening assays to identify antagonists of hIL-5. See, D. Bennett et al., J. Molecular Recognition 8:52-58 (1995); K. Johanson et al., J. Biol. Chem. 270:9459-9471 (1995).

[0174] Moreover, the polypeptides of the present invention can be fused to marker sequences, such as a polypeptide, which facilitates purification of the fused polypeptide. In preferred embodiments, the marker amino acid sequence is a hexa-histidine peptide, such as the tag provided in a pQE vector (QIAGEN, Inc., 9259 Eton Avenue, Chatsworth, Calif., 91311), among others, many of which are commercially available. As described in Gentz et al., Proc. Natl. Acad. Sci. USA 86:821-824 (1989), for instance, hexa-histidine provides for convenient purification of the fusion protein. Another peptide tag useful for purification, the “HA” tag, corresponds to an epitope derived from the influenza hemagglutinin protein (Wilson et al., Cell 37:767 (1984).)

[0175] Additional fusion proteins of the invention may be generated through the techniques of gene-shuffling, motif-shuffling, exon-shuffling, and/or codon-shuffling (collectively referred to as “DNA shuffling”), briefly described below, and further described herein. DNA shuffling may be employed to modulate the activities of polypeptides of the invention, such methods can be used to generate polypeptides with altered activity, as well as agonists and antagonists of the polypeptides. See, generally, U.S. Pat. Nos. 5,605,793; 5,811,238; 5,830,721; 5,834,252; and 5,837,458, and Patten et al., Curr. Opinion Biotechnol. 8:724-33 (1997); Harayama, Trends Biotechnol. 16(2):76-82 (1998); Hansson et al., J. Mol. Biol. 287:265-76 (1999); and Lorenzo and Blasco, Biotechniques 24(2):308-13 (1998); each of these patents and publications are hereby incorporated by reference in its entirety). In a preferred embodiment, one or more components, motifs, sections, parts, domains, fragments, etc., of a polynucleotide encoding a polypeptide of the invention may be recombined with one or more components, motifs, sections, parts, domains, fragments, etc., of one or more heterologous molecules encoding a heterologous polypeptide.

[0176] Thus, any of these above fusions can be engineered using the polynucleotides or the polypeptides of the present invention.

[0177] Recombinant and Synthetic Production of Polypeptides of the Invention

[0178] The present invention also relates to vectors containing the polynucleotide of the present invention, host cells, and the production of polypeptides by synthetic and recombinant techniques. The vector may be, for example, a phage, plasmid, viral, or retroviral vector. Retroviral vectors may be replication competent or replication defective. In the latter case, viral propagation generally will occur only in complementing host cells.

[0179] The polynucleotides of the invention may be joined to a vector containing a selectable marker for propagation in a host. Generally, a plasmid vector is introduced in a precipitate, such as a calcium phosphate precipitate, or in a complex with a charged lipid. If the vector is a virus, it may be packaged in vitro using an appropriate packaging cell line and then transduced into host cells.

[0180] The polynucleotide insert should be operatively linked to an appropriate promoter, such as the phage lambda PL promoter, the E. coli lac, trp, phoA and tac promoters, the SV40 early and late promoters and promoters of retroviral LTRs, to name a few. Other suitable promoters will be known to the skilled artisan. The expression constructs will further contain sites for transcription initiation, termination, and, in the transcribed region, a ribosome binding site for translation. The coding portion of the transcripts expressed by the constructs will preferably include a translation initiating codon at the beginning and a termination codon (UAA, UGA or UAG) appropriately positioned at the end of the polypeptide to be translated.

[0181] As indicated, the expression vectors will preferably include at least one selectable marker. Such markers include dihydrofolate reductase, G418 or neomycin resistance, glutamine synthase, for eukaryotic cell culture and tetracycline, kanamycin or ampicillin resistance genes for culturing in E. coli and other bacteria. Representative examples of appropriate hosts include, but are not limited to, bacterial cells, such as E. coli, Streptomyces and Salmonella typhimurium cells; fungal cells, such as yeast cells (e.g., Saccharomyces cerevisiae or Pichia pastoris (ATCC Accession No. 201178)); insect cells such as Drosophila S2 and Spodoptera Sf9 cells; animal cells such as CHO, COS, 293, NSO and Bowes melanoma cells; and plant cells. Appropriate culture mediums and conditions for the above-described host cells are known in the art.

[0182] Among vectors preferred for use in bacteria include pQE70, pQE60 and pQE-9, available from QIAGEN, Inc.; pBluescript vectors, Phagescript vectors, pNH8A, pNH16a, pNH18A, pNH46A, available from Stratagene Cloning Systems, Inc.; and ptrc99a, pKK223-3, pKK233-3, pDR540, pRIT5 available from Pharmacia Biotech, Inc. Among preferred eukaryotic vectors are pWLNEO, pSV2CAT, pOG44, pXT1 and pSG available from Stratagene; and pSVK3, pBPV, pMSG and pSVL available from Pharmacia. Preferred expression vectors for use in yeast systems include, but are not limited to pYES2, pYD1, pTEF1/Zeo, pYES2/GS, pPICZ, pGAPZ, pGAPZalph, pPIC9, pPIC3.5, pHIL-D2, pHIL-S1, pPIC3.5K, pPIC9K, and PAO815 (all available from Invitrogen, Carlsbad, Calif.). Other suitable vectors will be readily apparent to the skilled artisan.

[0183] Vectors, which use glutamine synthase (GS) or DHFR as the selectable markers can be amplified in the presence of the drugs methionine sulphoximine or methotrexate, respectively. An advantage of glutamine synthase based vectors is the availabilty of cell lines (e.g., the murine myeloma cell line, NSO) which are glutamine synthase negative. Glutamine synthase expression systems can also function in glutamine synthase expressing cells (e.g., Chinese Hamster Ovary (CHO) cells) by providing additional inhibitor to prevent the functioning of the endogenous gene. A glutamine synthase expression system and components thereof are detailed in PCT publications: WO87/04462; WO86/05807; WO89/01036; WO89/10404; and WO91/06657 which are hereby incorporated in their entireties by reference herein. Additionally, glutamine synthase expression vectors can be obtained from Lonza Biologics, Inc. (Portsmouth, N.H.). Expression and production of monoclonal antibodies using a GS expression system in murine myeloma cells is described in Bebbington et al., Bio/technology 10:169(1992) and in Biblia and Robinson Biotechnol. Prog. 11:1 (1995) which are herein incorporated by reference.

[0184] The present invention also relates to host cells containing the above-described vector constructs described herein, and additionally encompasses host cells containing nucleotide sequences of the invention that are operably associated with one or more heterologous control regions (e.g., promoter and/or enhancer) using techniques known of in the art. The host cell can be a higher eukaryotic cell, such as a mammalian cell (e.g., a human derived cell), or a lower eukaryotic cell, such as a yeast cell, or the host cell can be a prokaryotic cell, such as a bacterial cell. A host strain may be chosen which modulates the expression of the inserted gene sequences, or modifies and processes the gene product in the specific fashion desired. Expression from certain promoters can be elevated in the presence of certain inducers; thus expression of the genetically engineered polypeptide may be controlled. Furthermore, different host cells have characteristics and specific mechanisms for the translational and post-translational processing and modification (e.g., phosphorylation, cleavage) of proteins. Appropriate cell lines can be chosen to ensure the desired modifications and processing of the foreign protein expressed.

[0185] Introduction of the nucleic acids and nucleic acid constructs of the invention into the host cell can be effected by calcium phosphate transfection, DEAE-dextran mediated transfection, cationic lipid-mediated transfection, electroporation, transduction, infection, or other methods. Such methods are described in many standard laboratory manuals, such as Davis et al., Basic Methods In Molecular Biology (1986). It is specifically contemplated that the polypeptides of the present invention may in fact be expressed by a host cell lacking a recombinant vector.

[0186] In addition to encompassing host cells containing the vector constructs discussed herein, the invention also encompasses primary, secondary, and immortalized host cells of vertebrate origin, particularly mammalian origin, that have been engineered to delete or replace endogenous genetic material (e.g., ovarian and/or breast cancer antigen coding sequence), and/or to include genetic material (e.g., heterologous polynucleotide sequences) that is operably associated with ovarian and/or breast cancer associated polynucleotides of the invention, and which activates, alters, and/or amplifies endogenous ovarian and/or breast cancer associated polynucleotides. For example, techniques known in the art may be used to operably associate heterologous control regions (e.g., promoter and/or enhancer) and endogenous ovarian and/or breast cancer associated polynucleotide sequences via homologous recombination (see, e.g., U.S. Pat. No. 5,641,670, issued Jun. 24, 1997; International Publication Number WO 96/29411; International Publication Number WO 94/12650; Koller et al., Proc. Natl. Acad. Sci. USA 86:8932-8935 (1989); and Zijlstra et al., Nature 342:435-438 (1989), the disclosures of each of which are incorporated by reference in their entireties).

[0187] Polypeptides of the present invention can also be recovered from: products purified from natural sources, including bodily fluids, tissues and cells, whether directly isolated or cultured; products of chemical synthetic procedures; and products produced by recombinant techniques from a prokaryotic or eukaryotic host, including, for example, bacterial, yeast, higher plant, insect, and mammalian cells. Depending upon the host employed in a recombinant production procedure, the polypeptides of the present invention may be glycosylated or may be non-glycosylated. In addition, polypeptides of the invention may also include an initial modified methionine residue, in some cases as a result of host-mediated processes. Thus, it is well known in the art that the N-terminal methionine encoded by the translation initiation codon generally is removed with high efficiency from any protein after translation in all eukaryotic cells. While the N-terminal methionine on most proteins also is efficiently removed in most prokaryotes, for some proteins, this prokaryotic removal process is inefficient, depending on the nature of the amino acid to which the N-terminal methionine is covalently linked.

[0188] In one embodiment, the yeast Pichia pastoris is used to express polypeptides of the invention in a eukaryotic system. Pichia pastoris is a methylotrophic yeast which can metabolize methanol as its sole carbon source. A main step in the methanol metabolization pathway is the oxidation of methanol to formaldehyde using O₂. This reaction is catalyzed by the enzyme alcohol oxidase. In order to metabolize methanol as its sole carbon source, Pichia pastoris must generate high levels of alcohol oxidase due, in part, to the relatively low affinity of alcohol oxidase for O₂. Consequently, in a growth medium depending on methanol as a main carbon source, the promoter region of one of the two alcohol oxidase genes (AOX1) is highly active. In the presence of methanol, alcohol oxidase produced from the AOX1 gene comprises up to approximately 30% of the total soluble protein in Pichia pastoris. See, Ellis, S. B., et al., Mol. Cell. Biol. 5:1111-21 (1985); Koutz, P. J, et al., Yeast 5:167-77 (1989); Tschopp, J. F., et al., Nucl. Acids Res. 15:3859-76 (1987). Thus, a heterologous coding sequence, such as, for example, a polynucleotide of the present invention, under the transcriptional regulation of all or part of the AOX1 regulatory sequence is expressed at exceptionally high levels in Pichia yeast grown in the presence of methanol.

[0189] In one example, the plasmid vector pPIC9K is used to express DNA encoding a polypeptide of the invention, as set forth herein, in a Pichea yeast system essentially as described in “Pichia Protocols: Methods in Molecular Biology,” D. R. Higgins and J. Cregg, eds. The Humana Press, Totowa, N.J., 1998. This expression vector allows expression and secretion of a polypeptide of the invention by virtue of the strong AOX1 promoter linked to the Pichia pastoris alkaline phosphatase (PHO) secretory signal peptide (i.e., leader) located upstream of a multiple cloning site.

[0190] Many other yeast vectors could be used in place of pPIC9K, such as, pYES2, pYD1, pTEF1/Zeo, pYES2/GS, pPICZ, pGAPZ, pGAPZalpha, pPIC9, pPIC3.5, pHIL-D2, pHIL-S1, pPIC3.5K, and PAO815, as one skilled in the art would readily appreciate, as long as the proposed expression construct provides appropriately located signals for transcription, translation, secretion (if desired), and the like, including an in-frame AUG as required.

[0191] In another embodiment, high-level expression of a heterologous coding sequence, such as, for example, a polynucleotide of the present invention, may be achieved by cloning the heterologous polynucleotide of the invention into an expression vector such as, for example, pGAPZ or pGAPZalpha, and growing the yeast culture in the absence of methanol.

[0192] In addition to encompassing host cells containing the vector constructs discussed herein, the invention also encompasses primary, secondary, and immortalized host cells of vertebrate origin, particularly mammalian origin, that have been engineered to delete or replace endogenous genetic material (e.g., coding sequence), and/or to include genetic material (e.g., heterologous polynucleotide sequences) that is operably associated with polynucleotides of the invention, and which activates, alters, and/or amplifies endogenous polynucteotides. For example, techniques known in the art may be used to operably associate heterologous control regions (e.g., promoter and/or enhancer) and endogenous polynucleotide sequences via homologous recombination (see, e.g., U.S. Pat. No. 5,641,670, issued Jun. 24, 1997; International Publication No. WO 96/29411, published Sep. 26, 1996; International Publication No. WO 94/12650, published Aug. 4, 1994; Koller et al., Proc. Natl. Acad. Sci. USA 86:8932-8935 (1989); and Zijlstra et al., Nature 342:435-438 (1989), the disclosures of each of which are incorporated by reference in their entireties).

[0193] In addition, polypeptides of the invention can be chemically synthesized using techniques known in the art (e.g., see Creighton, 1983, Proteins: Structures and Molecular Principles, W. H. Freeman & Co., N.Y., and Hunkapiller et al., Nature, 310:105-111 (1984)). For example, a polypeptide corresponding to a fragment of a polypeptide can be synthesized by use of a peptide synthesizer. Furthermore, if desired, nonclassical amino acids or chemical amino acid analogs can be introduced as a substitution or addition into the polypeptide sequence. Non-classical amino acids include, but are not limited to, to the D-isomers of the common amino acids, 2,4-diaminobutyric acid, a-amino isobutyric acid, 4-aminobutyric acid, Abu, 2-amino butyric acid, g-Abu, e-Ahx, 6-amino hexanoic acid, Aib, 2-amino isobutyric acid, 3-amino propionic acid, ornithine, norleucine, norvaline, hydroxyproline, sarcosine, citrulline, homocitrulline, cysteic acid, t-butylglycine, t-butylalanine, phenylglycine, cyclohexylalanine, b-alanine, fluoro-amino acids, designer amino acids such as b-methyl amino acids, Ca-methyl amino acids, Na-methyl amino acids, and amino acid analogs in general. Furthermore, the amino acid can be D (dextrorotary) or L (levorotary).

[0194] The invention encompasses polypeptides of the present invention which are differentially modified during or after translation, e.g., by glycosylation, acetylation, phosphorylation, amidation, derivatization by known protecting/blocking groups, proteolytic cleavage, linkage to an antibody molecule or other cellular ligand, etc. Any of numerous chemical modifications may be carried out by known techniques, including but not limited, to specific chemical cleavage by cyanogen bromide, trypsin, chymotrypsin, papain, V8 protease, NaBH₄; acetylation, formylation, oxidation, reduction; metabolic synthesis in the presence of tunicamycin; etc.

[0195] Additional post-translational modifications encompassed by the invention include, for example, e.g., N-linked or O-linked carbohydrate chains, processing of N-terminal or C-terminal ends), attachment of chemical moieties to the amino acid backbone, chemical modifications of N-linked or O-linked carbohydrate chains, and addition or deletion of an N-terminal methionine residue as a result of procaryotic host cell expression. The polypeptides may also be modified with a detectable label, such as an enzymatic, fluorescent, isotopic or affinity label to allow for detection and isolation of the protein.

[0196] Examples of suitable enzymes include horseradish peroxidase, alkaline phosphatase, beta-galactosidase, or acetylcholinesterase; examples of suitable prosthetic group complexes include streptavidin/biotin and avidin/biotin; examples of suitable fluorescent materials include umbelliferone, fluorescein, fluorescein isothiocyanate, rhodamine, dichlorotriazinylamine fluorescein, dansyl chloride or phycoerythrin; an example of a luminescent material includes luminol; examples of bioluminescent materials include luciferase, luciferin, and aequorin; and examples of suitable radioactive material include iodine (¹²¹I, ¹²³I, ¹²⁸I, ¹³¹I), carbon (¹⁴C), sulfur (³⁵S), tritium (³H), indium (¹¹¹^{In,} ¹¹²In, ^{113m}In, ^{115m}In), technetium (⁹⁹Tc, ^{99m}Tc), thallium (²⁰¹Ti), gallium (⁶⁸Ga, ⁶⁷Ga), palladium (¹⁰³Pd), molybdenum (⁹⁹Mo), xenon (¹³³Xe), fluorine (¹⁸F), ¹⁵³Sm, ¹⁷⁷Lu, ¹⁵⁹Gd, ¹⁴⁹Pm, ¹⁴⁰La, ¹⁷⁵Yb, ¹⁶⁶Ho, ⁹⁰Y, ⁴⁷Sc, ¹⁸⁶Re, ¹⁸⁸Re, ¹⁴²Pr, ¹⁰⁵Rh, and ⁹⁷Ru.

[0197] In specific embodiments, a polypeptide of the present invention or fragment or variant thereof is attached to macrocyclic chelators that associate with radiometal ions, including but not limited to, ¹⁷⁷Lu, ⁹⁰Y, ¹⁶⁶Ho, and ¹⁵³Sm, to polypeptides. In a preferred embodiment, the radiometal ion associated with the macrocyclic chelators is ¹¹¹In. In another preferred embodiment, the radiometal ion associated with the macrocyclic chelator is ⁹⁰Y. In specific embodiments, the macrocyclic chelator is 1,4,7,10-tetraazacyclododecane-N,N′,N″,N′″-tetraacetic acid (DOTA). In other specific embodiments, DOTA is attached to an antibody of the invention or fragment thereof via a linker molecule. Examples of linker molecules useful for conjugating DOTA to a polypeptide are commonly known in the art—see, for example, DeNardo et al., Clin Cancer Res. 4(10):2483-90 (1998); Peterson et al., Bioconjug. Chem. 10(4):553-7 (1999); and Zimmerman et al, Nucl. Med. Biol. 26(8):943-50 (1999); which are hereby incorporated by reference in their entirety.

[0198] As mentioned, the ovarian and/or breast cancer associated proteins of the invention may be modified by either natural processes, such as posttranslational processing, or by chemical modification techniques which are well known in the art. It will be appreciated that the same type of modification may be present in the same or varying degrees at several sites in a given ovarian and/or breast cancer associated polypeptide. Ovarian and/or breast cancer associated polypeptides may be branched, for example, as a result of ubiquitination, and they may be cyclic, with or without branching. Cyclic, branched, and branched cyclic ovarian and/or breast cancer associated polypeptides may result from posttranslation natural processes or may be made by synthetic methods. Modifications include acetylation, acylation, ADP-ribosylation, amidation, covalent attachment of flavin, covalent attachment of a heme moiety, covalent attachment of a nucleotide or nucleotide derivative, covalent attachment of a lipid or lipid derivative, covalent attachment of phosphotidylinositol, cross-linking, cyclization, disulfide bond formation, demethylation, formation of covalent cross-links, formation of cysteine, formation of pyroglutamate, formylation, gamma-carboxylation, glycosylation, GPI anchor formation, hydroxylation, iodination, methylation, myristoylation, oxidation, pegylation, proteolytic processing, phosphorylation, prenylation, racemization, selenoylation, sulfation, transfer-RNA mediated addition of amino acids to proteins such as arginylation, and ubiquitination. (See, for instance, PROTEINS—STRUCTURE AND MOLECULAR PROPERTIES, 2nd Ed., T. E. Creighton, W. H. Freeman and Company, New York (1993); POSTTRANSLATIONAL COVALENT MODIFICATION OF PROTEINS, B. C. Johnson, Ed., Academic Press, New York, pgs. 1-12 (1983); Seifter et al., Meth. Enzymol. 182:626-646 (1990); Rattan et al., Ann. N.Y. Acad. Sci. 663:48-62 (1992)).

[0199] Also provided by the invention are chemically modified derivatives of the polypeptides of the invention which may provide additional advantages such as increased solubility, stability and circulating time of the polypeptide, or decreased immunogenicity (see U.S. Pat. No. 4,179,337). The chemical moieties for derivitization may be selected from water soluble polymers such as polyethylene glycol, ethylene glycol/propylene glycol copolymers, carboxymethylcellulose, dextran, polyvinyl alcohol and the like. The polypeptides may be modified at random positions within the molecule, or at predetermined positions within the molecule and may include one, two, three or more attached chemical moieties.

[0200] The polymer may be of any molecular weight, and may be branched or unbranched. For polyethylene glycol, the preferred molecular weight is between about 1 kDa and about 100 kDa (the term “about” indicating that in preparations of polyethylene glycol, some molecules will weigh more, some less, than the stated molecular weight) for ease in handling and manufacturing. Other sizes may be used, depending on the desired therapeutic profile (e.g., the duration of sustained release desired, the effects, if any on biological activity, the ease in handling, the degree or lack of antigenicity and other known effects of the polyethylene glycol to a therapeutic protein or analog). For example, the polyethylene glycol may have an average molecular weight of about 200, 500, 1000, 1500, 2000, 2500, 3000, 3500, 4000, 4500, 5000, 5500, 6000, 6500, 7000, 7500, 8000, 8500, 9000, 9500, 10,000, 10,500, 11,000, 11,500, 12,000, 12,500, 13,000, 13,500, 14,000, 14,500, 15,000, 15,500, 16,000, 16,500, 17,000, 17,500, 18,000, 18,500, 19,000, 19,500, 20,000, 25,000, 30,000, 35,000, 40,000, 50,000, 55,000, 60,000, 65,000, 70,000, 75,000, 80,000, 85,000, 90,000, 95,000, or 100,000 kDa.

[0201] As noted above, the polyethylene glycol may have a branched structure. Branched polyethylene glycols are described, for example, in U.S. Pat. No. 5,643,575; Morpurgo et al., Appl. Biochem. Biotechnol. 56:59-72 (1996); Vorobjev et al., Nucleosides Nucleotides 18:2745-2750 (1999); and Caliceti et al., Bioconjug. Chem. 10:638-646 (1999), the disclosures of each of which are incorporated herein by reference.

[0202] The polyethylene glycol molecules (or other chemical moieties) should be attached to the protein with consideration of effects on functional or antigenic domains of the protein. There are a number of attachment methods available to those skilled in the art, such as, for example, the method disclosed in EP 0 401 384 (coupling PEG to G-CSF), herein incorporated by reference; see also Malik et al., Exp. Hematol. 20:1028-1035 (1992), reporting pegylation of GM-CSF using tresyl chloride. For example, polyethylene glycol may be covalently bound through amino acid residues via a reactive group, such as a free amino or carboxyl group. Reactive groups are those to which an activated polyethylene glycol molecule may be bound. The amino acid residues having a free amino group may include lysine residues and the N-terminal amino acid residues; those having a free carboxyl group may include aspartic acid residues glutamic acid residues and the C-terminal amino acid residue. Sulfhydryl groups may also be used as a reactive group for attaching the polyethylene glycol molecules. Preferred for therapeutic purposes is attachment at an amino group, such as attachment at the N-terminus or lysine group.

[0203] As suggested above, polyethylene glycol may be attached to proteins via linkage to any of a number of amino acid residues. For example, polyethylene glycol can be linked to proteins via covalent bonds to lysine, histidine, aspartic acid, glutamic acid, or cysteine residues. One or more reaction chemistries may be employed to attach polyethylene glycol to specific amino acid residues (e.g., lysine, histidine, aspartic acid, glutamic acid, or cysteine) of the protein or to more than one type of amino acid residue (e.g., lysine, histidine, aspartic acid, glutamic acid, cysteine and combinations thereof) of the protein.

[0204] One may specifically desire proteins chemically modified at the N-terminus. Using polyethylene glycol as an illustration of the present composition, one may select from a variety of polyethylene glycol molecules (by molecular weight, branching, etc.), the proportion of polyethylene glycol molecules to protein (polypeptide) molecules in the reaction mix, the type of pegylation reaction to be performed, and the method of obtaining the selected N-terminally pegylated protein. The method of obtaining the N-terminally pegylated preparation (i.e., separating this moiety from other monopegylated moieties if necessary) may be by purification of the N-terminally pegylated material from a population of pegylated protein molecules. Selective proteins chemically modified at the N-terminus modification may be accomplished by reductive alkylation which exploits differential reactivity of different types of primary amino groups (lysine versus the N-terminal) available for derivatization in a particular protein. Under the appropriate reaction conditions, substantially selective derivatization of the protein at the N-terminus with a carbonyl group containing polymer is achieved.

[0205] As indicated above, pegylation of the proteins of the invention may be accomplished by any number of means. For example, polyethylene glycol may be attached to the protein either directly or by an intervening linker. Linkerless systems for attaching polyethylene glycol to proteins are described in Delgado et al., Crit. Rev. Thera. Drug Carrier Sys. 9:249-304 (1992); Francis et al., Intern. J. of Hematol. 68:1-18 (1998); U.S. Pat. No. 4,002,531; U.S. Pat. No. 5,349,052; WO 95/06058; and WO 98/32466, the disclosures of each of which are incorporated herein by reference.

[0206] One system for attaching polyethylene glycol directly to amino acid residues of proteins without an intervening linker employs tresylated MPEG, which is produced by the modification of monmethoxy polyethylene glycol (MPEG) using tresylchloride (ClSO₂CH₂CF₃). Upon reaction of protein with tresylated MPEG, polyethylene glycol is directly attached to amine groups of the protein. Thus, the invention includes protein-polyethylene glycol conjugates produced by reacting proteins of the invention with a polyethylene glycol molecule having a 2,2,2-trifluoreothane sulphonyl group.

[0207] Polyethylene glycol can also be attached to proteins using a number of different intervening linkers. For example, U.S. Pat. No. 5,612,460, the entire disclosure of which is incorporated herein by reference, discloses urethane linkers for connecting polyethylene glycol to proteins. Protein-polyethylene glycol conjugates wherein the polyethylene glycol is attached to the protein by a linker can also be produced by reaction of proteins with compounds such as MPEG-succinimidylsuccinate, MPEG activated with 1,1′-carbonyldiimidazole, MPEG-2,4,5-trichloropenylcarbonate, MPEG-p-nitrophenolcarbonate, and various MPEG-succinate derivatives. A number of additional polyethylene glycol derivatives and reaction chemistries for attaching polyethylene glycol to proteins are described in International Publication No. WO 98/32466, the entire disclosure of which is incorporated herein by reference. Pegylated protein products produced using the reaction chemistries set out herein are included within the scope of the invention.

[0208] The number of polyethylene glycol moieties attached to each protein of the invention (i.e., the degree of substitution) may also vary. For example, the pegylated proteins of the invention may be linked, on average, to 1, 2, 3, 4, 5, 6, 7, 8, 9, 10, 12, 15, 17, 20, or more polyethylene glycol molecules. Similarly, the average degree of substitution within ranges such as 1-3, 2-4, 3-5, 4-6, 5-7, 6-8, 7-9, 8-10, 9-11, 10-12, 11-13, 12-14, 13-15, 14-16, 15-17, 16-18, 17-19, or 18-20 polyethylene glycol moieties per protein molecule. Methods for determining the degree of substitution are discussed, for example, in Delgado et al., Crit. Rev. Thera. Drug Carrier Sys. 9:249-304 (1992).

[0209] The ovarian and/or breast cancer associated polypeptides of the invention can be recovered and purified from chemical synthesis and recombinant cell cultures by standard methods which include, but are not limited to, ammonium sulfate or ethanol precipitation, acid extraction, anion or cation exchange chromatography, phosphocellulose chromatography, hydrophobic interaction chromatography, affinity chromatography, hydroxylapatite chromatography and lectin chromatography. Most preferably, high performance liquid chromatography (“HPLC”) is employed for purification. Well known techniques for refolding protein may be employed to regenerate active conformation when the polypeptide is denatured during isolation and/or purification.

[0210] Ovarian and/or breast cancer associated polynucleotides and polypeptides may be used in accordance with the present invention for a variety of applications, particularly those that make use of the chemical and biological properties of ovarian and/or breast cancer associated antigens. Among these are applications in the detection, prevention, diagnosis and/or treatment of ovarian and/or breast cancer, such as e.g., cancers of the ovaries, such as primary and secondary cancerous growth, endometrioid carcinoma of the ovary, ovarian papillary serous adenocarcinoma, ovarian mucinous adenocarcinoma, and ovarian Krukenberg tumors; and cancers of the breast, such as in situ carcinomas (e.g., ductal carcinoma in situ, Paget's disease, and lobular carcinoma in situ), invasive carcinomas (e.g., invasive ductal carcinoma, invasive lobular carcinoma, medullary carcinoma, colloid (mucinous) carcinoma, tubular carcinoma, and invasive papillary carcinoma), and fibroadenoma, pipillary carcinoma, secretory carcinoma, and apocrine carcinoma; and/or as described under “Hyperproliferative Disorders” and “Reproductive System Disorders” below. Additional applications relate to diagnosis and to treatment of disorders of cells, tissues and organisms. These aspects of the invention are discussed further below.

[0211] In a preferred embodiment, polynucleotides expressed in a particular tissue type (see, e.g., Table 1A, column 7) are used to detect, diagnose, treat, prevent and/or prognose disorders associated with the tissue type.

[0212] The polypeptides of the invention may be in monomers or multimers (i.e., dimers, trimers, tetramers and higher multimers). Accordingly, the present invention relates to monomers and multimers of the polypeptides of the invention, their preparation, and compositions (preferably, Therapeutics) containing them. In specific embodiments, the polypeptides of the invention are monomers, dimers, trimers or tetramers. In additional embodiments, the multimers of the invention are at least dimers, at least trimers, or at least tetramers.

[0213] Multimers encompassed by the invention may be homomers or heteromers. As used herein, the term homomer refers to a multimer containing only polypeptides corresponding to a protein of the invention (e.g., the amino acid sequence of SEQ ID NO:Y, an amino acid sequence encoded by SEQ ID NO:X or the complement of SEQ ID NO:X, the amino acid sequence encoded by the portion of SEQ ID NO:X as defined in columns 8 and 9 of Table 2, and/or an amino acid sequence encoded by cDNA contained in Clone ID NO:Z (including fragments, variants, splice variants, and fusion proteins, corresponding to these as described herein)). These homomers may contain polypeptides having identical or different amino acid sequences. In a specific embodiment, a homomer of the invention is a multimer containing only polypeptides having an identical amino acid sequence. In another specific embodiment, a homomer of the invention is a multimer containing polypeptides having different amino acid sequences. In specific embodiments, the multimer of the invention is a homodimer (e.g., containing two polypeptides having identical or different amino acid sequences) or a homotrimer (e.g., containing three polypeptides having identical and/or different amino acid sequences). In additional embodiments, the homomeric multimer of the invention is at least a homodimer, at least a homotrimer, or at least a homotetramer.

[0214] As used herein, the term heteromer refers to a multimer containing two or more heterologous polypeptides (i.e., polypeptides of different proteins) in addition to the potypeptides of the invention. In a specific embodiment, the multimer of the invention is a heterodimer, a heterbtrimer, or a heterotetramer. In additional embodiments, the heteromeric multimer of the invention is at least a heterodimer, at least a heterotrimer, or at least a heterotetramer.

[0215] Multimers of the invention may be the result of hydrophobic, hydrophilic, ionic and/or covalent associations and/or may be indirectly linked by, for example, liposome formation. Thus, in one embodiment, multimers of the invention, such as, for example, homodimers or homotrimers, are formed when polypeptides of the invention contact one another in solution. In another embodiment, heteromultimers of the invention, such as, for example, heterotrimers or heterotetramers, are formed when polypeptides of the invention contact antibodies to the polypeptides of the invention (including antibodies to the heterologous polypeptide sequence in a fusion protein of the invention) in solution. In other embodiments, multimers of the invention are formed by covalent associations with and/or between the polypeptides of the invention. Such covalent associations may involve one or more amino acid residues contained in the polypeptide sequence (e.g., that recited in SEQ ID NO:Y, encoded by the portion of SEQ ID NO:X as defined in columns 8 and 9 of Table 2, and/or encoded by the cDNA contained in Clone ID NO:Z). In one instance, the covalent associations are cross-linking between cysteine residues located within the polypeptide sequences which interact in the native (i.e., naturally occurring) polypeptide. In another instance, the covalent associations are the consequence of chemical or recombinant manipulation. Alternatively, such covalent associations may involve one or more amino acid residues contained in the heterologous polypeptide sequence in a fusion protein. In one example, covalent associations are between the heterologous sequence contained in a fusion protein of the invention (see, e.g., U.S. Pat. No. 5,478,925). In a specific example, the covalent associations are between the heterologous sequence contained in a Fc fusion protein of the invention (as described herein). In another specific example, covalent associations of fusion proteins of the invention are between heterologous polypeptide sequence from another protein that is capable of forming covalently associated multimers, such as for example, osteoprotegerin (see, e.g., International Publication NO: WO 98/49305, the contents of which are herein incorporated by reference in its entirety). In another embodiment, two or more polypeptides of the invention are joined through peptide linkers. Examples include those peptide linkers described in U.S. Pat. No. 5,073,627 (hereby incorporated by reference). Proteins comprising multiple polypeptides of the invention separated by peptide linkers may be produced using conventional recombinant DNA technology.

[0216] Another method for preparing multimer polypeptides of the invention involves use of polypeptides of the invention fused to a leucine zipper or isoleucine zipper polypeptide sequence. Leucine zipper and isoleucine zipper domains are polypeptides that promote multimerization of the proteins in which they are found. Leucine zippers were originally identified in several DNA-binding proteins (Landschulz et al., Science 240:1759, (1988)), and have since been found in a variety of different proteins. Among the known leucine zippers are naturally occurring peptides and derivatives thereof that dimerize or trimerize. Examples of leucine zipper domains suitable for producing soluble multimeric proteins of the invention are those described in PCT application WO 94/10308, hereby incorporated by reference. Recombinant fusion proteins comprising a polypeptide of the invention fused to a polypeptide sequence that dimerizes or trimerizes in solution are expressed in suitable host cells, and the resulting soluble multimeric fusion protein is recovered from the culture supernatant using techniques known in the art.

[0217] Trimeric polypeptides of the invention may offer the advantage of enhanced biological activity. Preferred leucine zipper moieties and isoleucine moieties are those that preferentially form trimers. One example is a leucine zipper derived from lung surfactant protein D (SPD), as described in Hoppe et al. (FEBS Letters 344:191, (1994)) and in U.S. patent application Ser. No. 08/446,922, hereby incorporated by reference. Other peptides derived from naturally occurring trimeric proteins may be employed in preparing trimeric polypeptides of the invention.

[0218] In another example, proteins of the invention are associated by interactions between Flag® polypeptide sequence contained in fusion proteins of the invention containing Flag® polypeptide sequence. In a further embodiment, proteins of the invention are associated by interactions between heterologous polypeptide sequence contained in Flag® fusion proteins of the invention and anti-Flag® antibody.

[0219] The multimers of the invention may be generated using chemical techniques known in the art. For example, polypeptides desired to be contained in the multimers of the invention may be chemically cross-linked using linker molecules and linker molecule length optimization techniques known in the art (see, e.g., U.S. Pat. No. 5,478,925, which is herein incorporated by reference in its entirety). Additionally, multimers of the invention may be generated using techniques known in the art to form one or more inter-molecule cross-links between the cysteine residues located within the sequence of the polypeptides desired to be contained in the multimer (see, e.g., U.S. Pat. No. 5,478,925, which is herein incorporated by reference in its entirety). Further, polypeptides of the invention may be routinely modified by the addition of cysteine or biotin to the C-terminus or N-terminus of the polypeptide and techniques known in the art may be applied to generate multimers containing one or more of these modified polypeptides (see, e.g., U.S. Pat. No. 5,478,925, which is herein incorporated by reference in its entirety). Additionally, techniques known in the art may be applied to generate liposomes containing the polypeptide components desired to be contained in the multimer of the invention (see, e.g., U.S. Pat. No. 5,478,925, which is herein incorporated by reference in its entirety).

[0220] Alternatively, multimers of the invention may be generated using genetic engineering techniques known in the art. In one embodiment, polypeptides contained in multimers of the invention are produced recombinantly using fusion protein technology described herein or otherwise known in the art (see, e.g., U.S. Pat. No. 5,478,925, which is herein incorporated by reference in its entirety). In a specific embodiment, polynucleotides coding for a homodimer of the invention are generated by ligating a polynucleotide sequence encoding a polypeptide of the invention to a sequence encoding a linker polypeptide and then further to a synthetic polynucleotide encoding the translated product of the polypeptide in the reverse orientation from the original C-terminus to the N-terminus (lacking the leader sequence) (see, e.g., U.S. Pat. No. 5,478,925, which is herein incorporated by reference in its entirety). In another embodiment, recombinant techniques described herein or otherwise known in the art are applied to generate recombinant polypeptides of the invention which contain a transmembrane domain (or hydrophobic or signal peptide) and which can be incorporated by membrane reconstitution techniques into liposomes (see, e.g., U.S. Pat. No. 5,478,925, which is herein incorporated by reference in its entirety).

[0221] Antibodies

[0222] Further polypeptides of the invention relate to antibodies and T-cell antigen receptors (TCR) which immunospecifically bind a polypeptide, polypeptide fragment, or variant of the invention (e.g., a polypeptide or fragment or variant of the amino acid sequence of SEQ ID NO:Y or a polypeptide encoded by the cDNA contained in Clone ID NO:Z, and/or an epitope, of the present invention) as determined by immunoassays well known in the art for assaying specific antibody-antigen binding. Antibodies of the invention include, but are not limited to, polyclonal, monoclonal, multispecific, human, humanized or chimeric antibodies, single chain antibodies, Fab fragments, F(ab′) fragments, fragments produced by a Fab expression library, anti-idiotypic (anti-Id) antibodies (including, e.g., anti-Id antibodies to antibodies of the invention), intracellularly-made antibodies (i.e., intrabodies), and epitope-binding fragments of any of the above. The term “antibody,” as used herein, refers to immunoglobulin molecules and immunologically active portions of immunoglobulin molecules, i.e. molecules that contain an antigen binding site that immunospecifically binds an antigen. The immunoglobulin molecules of the invention can be of any type (e.g., IgG, IgE, IgM, IgD, IgA and IgY), class (e.g., IgG1, IgG2, IgG3, IgG4, IgAl and IgA2) or subclass of immunoglobulin molecule. In preferred embodiments, the immunoglobulin molecules of the invention are IgG1. In other preferred embodiments, the immunoglobulin molecules of the invention are IgG4.

[0223] Most preferably the antibodies are human antigen-binding antibody fragments of the present invention and include, but are not limited to, Fab, Fab′ and F(ab′)2, Fd, single-chain Fvs (scFv), single-chain antibodies, disulfide-linked Fvs (sdFv) and fragments comprising either a VL or VH domain. Antigen-binding antibody fragments, including single-chain antibodies, may comprise the variable region(s) alone or in combination with the entirety or a portion of the following: hinge region, CH1, CH2, and CH3 domains. Also included in the invention are antigen-binding fragments also comprising any combination of variable region(s) with a hinge region, CH1, CH2, and CH3 domains. The antibodies of the invention may be from any animal origin including birds and mammals. Preferably, the antibodies are human, murine (e.g., mouse and rat), donkey, ship rabbit, goat, guinea pig, camel, horse, or chicken. As used herein, “human” antibodies include antibodies having the amino acid sequence of a human immunoglobulin and include antibodies isolated from human immunoglobulin libraries or from animals transgenic for one or more human immunoglobulin and that do not express endogenous immunoglobulins, as described infra and, for example in, U.S. Pat. No. 5,939,598 by Kucherlapati et al.

[0224] The antibodies of the present invention may be monospecific, bispecific, trispecific or of greater multispecificity. Multispecific antibodies may be specific for different epitopes of a polypeptide of the present invention or may be specific for both a polypeptide of the present invention as well as for a heterologous epitope, such as a heterologous polypeptide or solid support material. See, e.g., PCT publications WO 93/17715; WO 92/08802; WO 91/00360; WO 92/05793; Tutt, et al., J. Immunol. 147:60-69 (1991); U.S. Pat. Nos. 4,474,893; 4,714,681; 4,925,648; 5,573,920; 5,601,819; Kostelny et al., J. Immunol. 148:1547-1553 (1992).

[0225] Antibodies of the present invention may be described or specified in terms of the epitope(s) or portion(s) of a polypeptide of the present invention, which they recognize or specifically bind. The epitope(s) or polypeptide portion(s) may be specified as described herein, e.g., by N-terminal and C-terminal positions, or by size in contiguous amino acid residues, or listed in the Tables and Figures. Preferred epitopes of the invention include those shown in column 6 of Table 1A, as well as polynucleotides that encode these epitopes. Antibodies, which specifically bind any epitope or polypeptide of the present invention may also be excluded. Therefore, the present invention includes antibodies that specifically bind polypeptides of the present invention, and allows for the exclusion of the same.

[0226] Antibodies of the present invention may also be described or specified in terms of their cross-reactivity. Antibodies that do not bind any other analog, ortholog, or homolog of a polypeptide of the present invention are included. Antibodies that bind polypeptides with at least 95%, at least 90%, at least 85%, at least 80%, at least 75%, at least 70%, at least 65%, at least 60%, at least 55%, and at least 50% identity (as calculated using methods known in the art and described herein) to a polypeptide of the present invention are also included in the present invention. In specific embodiments, antibodies of the present invention cross-react with murine, rat and/or rabbit homologs of human proteins and the corresponding epitopes thereof. Antibodies that do not bind polypeptides with less than 95%, less than 90%, less than 85%, less than 80%, less than 75%, less than 70%, less than 65%, less than 60%, less than 55%, and less than 50% identity (as calculated using methods known in the art and described herein) to a polypeptide of the present invention are also included in the present invention. In a specific embodiment, the above-described cross-reactivity is with respect to any single specific antigenic or immunogenic polypeptide, or combination(s) of 2, 3, 4, 5, or more of the specific antigenic and/or immunogenic polypeptides disclosed herein. Further included in the present invention are antibodies, which bind polypeptides encoded by polynucleotides which hybridize to a polynucleotide of the present invention under stringent hybridization conditions (as described herein). Antibodies of the present invention may also be described or specified in terms of their binding affinity to a polypeptide of the invention. Preferred binding affinities include those with a dissociation constant or Kd less than 5×10⁻² M, 10⁻² M, 5×10⁻³ M, 10⁻³ M, 5×10⁻⁴ M, 10⁻⁴ M, 5×10⁻⁵ M, 10⁻⁵ M, 5×10⁻⁶ M, 10⁻⁶ M, 5×10⁻⁷ M, 10⁷ M, 5×10⁻⁸ M, 10⁻⁸ M, 5×10⁻⁹ M, 10⁻⁹ M, 5×10⁻¹⁰ M, 10⁻¹⁰ M, 5×10⁻¹¹ M, 10⁻¹¹ M, 5×10⁻¹² M, 10⁻¹² M, 5×10⁻¹³ M, 10⁻¹³ M, 5×10⁻¹⁴ M, 10⁻¹⁴ M, 5×10⁻¹⁵ M, or 10⁻¹⁵ M.

[0227] The invention also provides antibodies that competitively inhibit binding of an antibody to an epitope of the invention as determined by any method known in the art for determining competitive binding, for example, the immunoassays described herein. In preferred embodiments, the antibody competitively inhibits binding to the epitope by at least 95%, at least 90%, at least 85%, at least 80%, at least 75%, at least 70%, at least 60%, or at least 50%.

[0228] Antibodies of the present invention may act as agonists or antagonists of the polypeptides of the present invention. For example, the present invention includes antibodies, which disrupt the receptor/ligand interactions with the polypeptides of the invention either partially or fully. Preferably, antibodies of the present invention bind an antigenic epitope disclosed herein, or a portion thereof. The invention features both receptor-specific antibodies and ligand-specific antibodies. The invention also features receptor-specific antibodies, which do not prevent ligand binding but prevent receptor activation. Receptor activation (i.e., signaling) may be determined by techniques described herein or otherwise known in the art. For example, receptor activation can be determined by detecting the phosphorylation (e.g., tyrosine or serine/threonine) of the receptor or its substrate by immunoprecipitation followed by western blot analysis (for example, as described supra). In specific embodiments, antibodies are provided that inhibit ligand activity or receptor activity by at least 95%, at least 90%, at least 85%, at least 80%, at least 75%, at least 70%, at least 60%, or at least 50% of the activity in absence of the antibody.

[0229] The invention also features receptor-specific antibodies which both prevent ligand binding and receptor activation as well as antibodies that recognize the receptor-ligand complex, and, preferably, do not specifically recognize the unbound receptor or the unbound ligand. Likewise, included in the invention are neutralizing antibodies which bind the ligand and prevent binding of the ligand to the receptor, as well as antibodies which bind the ligand, thereby preventing receptor activation, but do not prevent the ligand from binding the receptor. Further included in the invention are antibodies, which activate the receptor. These antibodies may act as receptor agonists, i.e., potentiate or activate either all or a subset of the biological activities of the ligand-mediated receptor activation, for example, by inducing dimerization of the receptor. The antibodies may be specified as agonists, antagonists or inverse agonists for biological activities comprising the specific biological activities of the peptides of the invention disclosed herein. The above antibody agonists can be made using methods known in the art. See, e.g., PCT publication WO 96/40281; U.S. Pat. No. 5,811,097; Deng et al., Blood 92(6):1981-1988 (1998); Chen et al., Cancer Res. 58(16):3668-3678 (1998); Harrop et al., J. Immunol. 161(4):1786-1794 (1998); Zhu et al., Cancer Res. 58(15):3209-3214 (1998); Yoon et al., J. Immunol. 160(7):3170-3179 (1998); Prat et al., J. Cell. Sci. 111(Pt2):237-247 (1998); Pitard et al., J. Immunol. Methods 205(2):177-190 (1997); Liautard et al., Cytokine 9(4):233-241 (1997); Carlson et al., J. Biol. Chem. 272(17):11295-11301 (1997); Taryman et al., Neuron 14(4):755-762 (1995); Muller et al., Structure 6(9):1153-1167 (1998); Bartunek et al., Cytokine 8(1):14-20 (1996) (which are all incorporated by reference herein in their entireties).

[0230] Antibodies of the present invention may be used, for example, to purify, detect, and target the polypeptides of the present invention, including both in vitro and in vivo diagnostic and therapeutic methods. For example, the antibodies have utility in immunoassays for qualitatively and quantitatively measuring levels of the polypeptides of the present invention in biological samples. See, e.g., Harlow et al., Antibodies: A Laboratory Manual, (Cold Spring Harbor Laboratory Press, 2nd ed. 1988); incorporated by reference herein in its entirety.

[0231] As discussed in more detail below, the antibodies of the present invention may be used either alone or in combination with other compositions. The antibodies may further be recombinantly fused to a heterologous polypeptide at the N- or C-terminus or chemically conjugated (including covalent and non-covalent conjugations) to polypeptides or other compositions. For example, antibodies of the present invention may be recombinantly fused or conjugated to molecules useful as labels in detection assays and effector molecules such as heterologous polypeptides, drugs, radionuclides, or toxins. See, e.g., PCT publications WO 92/08495; WO 91/14438; WO 89/12624; U.S. Pat. No. 5,314,995; and EP 396,387; the disclosures of which are incorporated herein by reference in their entireties.

[0232] The antibodies of the invention include derivatives that are modified, i.e., by the covalent attachment of any type of molecule to the antibody such that covalent attachment does not prevent the antibody from generating an anti-idiotypic response. For example, but not by way of limitation, the antibody derivatives include antibodies that have been modified, e.g., by glycosylation, acetylation, pegylation, phosphylation, amidation, derivatization by known protecting/blocking groups, proteolytic cleavage, linkage to a cellular ligand or other protein, etc. Any of numerous chemical modifications may be carried out by known techniques, including, but not limited to specific chemical cleavage, acetylation, formylation, metabolic synthesis of tunicamycin, etc. Additionally, the derivative may contain one or more non-classical amino acids.

[0233] The antibodies of the present invention may be generated by any suitable method known in the art. Polyclonal antibodies to an antigen-of-interest can be produced by various procedures well known in the art. For example, a polypeptide of the invention can be administered to various host animals including, but not limited to, rabbits, mice, rats, etc. to induce the production of sera containing polyclonal antibodies specific for the antigen. Various adjuvants may be used to increase the immunological response, depending on the host species, and include but are not limited to, Freund's (complete and incomplete), mineral gels such as aluminum hydroxide, surface active substances such as lysolecithin, pluronic polyols, polyanions, peptides, oil emulsions, keyhole limpet hemocyanins, dinitrophenol, and potentially useful human adjuvants such as BCG (bacille Calmette-Guerin) and corynebacterium parvum. Such adjuvants are also well known in the art.

[0234] Monoclonal antibodies can be prepared using a wide variety of techniques known in the art including the use of hybridoma, recombinant, and phage display technologies, or a combination thereof. For example, monoclonal antibodies can be produced using hybridoma techniques including those known in the art and taught, for example, in Harlow et al., Antibodies: A Laboratory Manual, (Cold Spring Harbor Laboratory Press, 2nd ed. 1988); Hammerling, et al., in: Monoclonal Antibodies and T-Cell Hybridomas 563-681 (Elsevier, N.Y., 1981) (said references incorporated by reference in their entireties). The term “monoclonal antibody” as used herein is not limited to antibodies produced through hybridoma technology. The term “monoclonal antibody” refers to an antibody that is derived from a single clone, including any eukaryotic, prokaryotic, or phage clone, and not the method by which it is produced.

[0235] Methods for producing and screening for specific antibodies using hybridoma technology are routine and well known in the art and are discussed in detail in the Examples. In a non-limiting example, mice can be immunized with a polypeptide of the invention or a cell expressing such peptide. Once an immune response is detected, e.g., antibodies specific for the antigen are detected in the mouse serum, the mouse spleen is harvested and splenocytes isolated. The splenocytes are then fused by well known techniques to any suitable myeloma cells, for example cells from cell line SP20 available from the ATCC. Hybridomas are selected and cloned by limited dilution. The hybridoma clones are then assayed by methods known in the art for cells that secrete antibodies capable of binding a polypeptide of the invention. Ascites fluid, which generally contains high levels of antibodies, can be generated by immunizing mice with positive hybridoma clones.

[0236] Accordingly, the present invention provides methods of generating monoclonal antibodies as well as antibodies produced by the method comprising culturing a hybridoma cell secreting an antibody of the invention wherein, preferably, the hybridoma is generated by fusing splenocytes isolated from a mouse immunized with an antigen of the invention with myeloma cells and then screening the hybridomas resulting from the fusion for hybridoma clones that secrete an antibody able to bind a polypeptide of the invention.

[0237] Another well known method for producing both polyclonal and monoclonal human B cell lines is transformation using Epstein Barr Virus (EBV). Protocols for generating EBV-transformed B cell lines are commonly known in the art, such as, for example, the protocol outlined in Chapter 7.22 of Current Protocols in Immunology, Coligan et al., Eds., 1994, John Wiley & Sons, NY, which is hereby incorporated in its entirety by reference herein. The source of B cells for transformation is commonly human peripheral blood, but B cells for transformation may also be derived from other sources including, but not limited to, lymph nodes, tonsil, spleen, tumor tissue, and infected tissues. Tissues are generally made into single cell suspensions prior to EBV transformation. Additionally, steps may be taken to either physically remove or inactivate T cells (e.g., by treatment with cyclosporin A) in B cell-containing samples, because T cells from individuals seropositive for anti-EBV antibodies can suppress B cell immortalization by EBV.

[0238] In general, the sample containing human B cells is innoculated with EBV, and cultured for 3-4 weeks. A typical source of EBV is the culture supernatant of the B95-8 cell line (ATCC #VR-1492). Physical signs of EBV transformation can generally be seen towards the end of the 3-4 week culture period. By phase-contrast microscopy, transformed cells may appear large, clear, hairy and tend to aggregate in tight clusters of cells. Initially, EBV lines are generally polyclonal. However, over prolonged periods of cell cultures, EBV lines may become monoclonal or polyclonal as a result of the selective outgrowth of particular B cell clones. Alternatively, polyclonal EBV transformed lines may be subcloned (e.g., by limiting dilution culture) or fused with a suitable fusion partner and plated at limiting dilution to obtain monoclonal B cell lines. Suitable fusion partners for EBV transformed cell lines include mouse myeloma cell lines (e.g., SP2/0, X63-Ag8.653), heteromyeloma cell lines (human×mouse; e.g, SPAM-8, SBC-H20, and CB-F7), and human cell lines (e.g., GM 1500, SKO-007, RPMI 8226, and KR-4). Thus, the present invention also provides a method of generating polyclonal or monoclonal human antibodies against polypeptides of the invention or fragments thereof, comprising EBV-transformation of human B cells.

[0239] Antibody fragments, which recognize specific epitopes may be generated by known techniques. For example, Fab and F(ab′)2 fragments of the invention may be produced by proteolytic cleavage of immunoglobulin molecules, using enzymes such as papain (to produce Fab fragments) or pepsin (to produce F(ab′)2 fragments). F(ab′)2 fragments contain the variable region, the light chain constant region and the CHI domain of the heavy chain. For example, the antibodies of the present invention can also be generated using various phage display methods known in the art and as discussed in detail in the Examples (e.g., Example 10). In phage display methods, functional antibody domains are displayed on the surface of phage particles, which carry the polynucleotide sequences encoding them. In a particular embodiment, such phage can be utilized to display antigen binding domains expressed from a repertoire or combinatorial antibody library (e.g., human or murine). Phage expressing an antigen binding domain that binds the antigen of interest can be selected or identified with antigen, e.g., using labeled antigen or antigen bound or captured to a solid surface or bead. Phage used in these methods are typically filamentous phage including fd and M13 binding domains expressed from phage with Fab, Fv or disulfide stabilized Fv antibody domains recombinantly fused to either the phage gene III or gene VIII protein. Examples of phage display methods that can be used to make the antibodies of the present invention include those disclosed in Brinkman et al., J. Immunol. Methods 182:41-50 (1995); Ames et al., J. Immunol. Methods 184:177-186 (1995); Kettleborough et al., Eur. J. Immunol. 24:952-958 (1994); Persic et al., Gene 187 9-18 (1997); Burton et al., Advances in Immunology 57:191-280 (1994); PCT application No. PCT/GB91/01134; PCT publications WO 90/02809; WO 91/10737; WO 92/01047; WO 92/18619; WO 93/11236; WO 95/15982; WO 95/20401; and U.S. Pat. Nos. 5,698,426; 5,223,409; 5,403,484; 5,580,717; 5,427,908; 5,750,753; 5,821,047; 5,571,698; 5,427,908; 5,516,637; 5,780,225; 5,658,727; 5,733,743 and 5,969,108; each of which is incorporated herein by reference in its entirety.

[0240] As described in the above references, after phage selection, the antibody coding regions from the phage can be isolated and used to generate whole antibodies, including human antibodies, or any other desired antigen binding fragment, and expressed in any desired host, including mammalian cells, insect cells, plant cells, yeast, and bacteria, e.g., as described in detail below. For example, techniques to recombinantly produce Fab, Fab′ and F(ab′)2 fragments can also be employed using methods known in the art such as those disclosed in PCT publication WO 92/22324; Mullinax et al., BioTechniques 12(6):864-869 (1992); and Sawai et al., AJRI 34:26-34 (1995); and Better et al., Science 240:1041-1043 (1988) (said references incorporated by reference in their entireties).

[0241] Examples of techniques which can be used to produce single-chain Fvs and antibodies include those described in U.S. Pat. Nos. 4,946,778 and 5,258,498; Huston et al., Methods in Enzymology 203:46-88 (1991); Shu et al., PNAS 90:7995-7999 (1993); and Skerra et al., Science 240:1038-1040 (1988). For some uses, including in vivo use of antibodies in humans and in vitro detection assays, it may be preferable to use chimeric, humanized, or human antibodies. A chimeric antibody is a molecule in which different portions of the antibody are derived from different animal species, such as antibodies having a variable region derived from a murine monoclonal antibody and a human immunoglobulin constant region. Methods for producing chimeric antibodies are known in the art. See e.g., Morrison, Science 229:1202 (1985); Oi et al., BioTechniques 4:214 (1986); Gillies et al., (1989) J. Immunol. Methods 125:191-202; U.S. Pat. Nos. 5,807,715; 4,816,567; and 4,816,397, which are incorporated herein by reference in their entirety. Humanized antibodies are antibody molecules from non-human species antibody that binds the desired antigen having one or more complementarity determining regions (CDRs) from the non-human species and a framework regions from a human immunoglobulin molecule. Often, framework residues in the human framework regions will be substituted with the corresponding residue from the CDR donor antibody to alter, preferably improve, antigen binding. These framework substitutions are identified by methods well known in the art, e.g., by modeling of the interactions of the CDR and framework residues to identify framework residues important for antigen binding and sequence comparison to identify unusual framework residues at particular positions. (See, e.g., Queen et al., U.S. Pat. No. 5,585,089; Riechmann et al., Nature 332:323 (1988), which are incorporated herein by reference in their entireties.) Antibodies can be humanized using a variety of techniques known in the art including, for example, CDR-grafting (EP 239,400; PCT publication WO 91/09967; U.S. Pat. Nos. 5,225,539; 5,530,101; and 5,585,089), veneering or resurfacing (EP 592,106; EP 519,596; Padlan, Molecular Immunology 28(4/5):489-498 (1991); Studnicka et al., Protein Engineering 7(6):805-814 (1994); Roguska. et al., PNAS 91:969-973 (1994)), and chain shuffling (U.S. Pat. No. 5,565,332).

[0242] Completely human antibodies are particularly desirable for therapeutic treatment of human patients. Human antibodies can be made by a variety of methods known in the art including phage display methods described above using antibody libraries derived from human immunoglobulin sequences. See also, U.S. Pat. Nos. 4,444,887 and 4,716,111; and PCT publications WO 98/46645, WO 98/50433, WO 98/24893, WO 98/16654, WO 96/34096, WO 96/33735, and WO 91/10741; each of which is incorporated herein by reference in its entirety.

[0243] Human antibodies can also be produced using transgenic mice which are incapable of expressing functional endogenous immunoglobulins, but which can express human immunoglobulin genes. For example, the human heavy and light chain immunoglobulin gene complexes may be introduced randomly or by homologous recombination into mouse embryonic stem cells. Alternatively, the human variable region, constant region, and diversity region may be introduced into mouse embryonic stem cells in addition to the human heavy and light chain genes. The mouse heavy and light chain immunoglobulin genes may be rendered non-functional separately or simultaneously with the introduction of human immunoglobulin loci by homologous recombination. In particular, homozygous deletion of the JH region prevents endogenous antibody production. The modified embryonic stem cells are expanded and microinjected into blastocysts to produce chimeric mice. The chimeric mice are then bred to produce homozygous offspring, which express human antibodies. The transgenic mice are immunized in the normal fashion with a selected antigen, e.g., all or a portion of a polypeptide of the invention. Monoclonal antibodies directed against the antigen can be obtained from the immunized, transgenic mice using conventional hybridoma technology. The human immunoglobulin transgenes harbored by the transgenic mice rearrange during B cell differentiation, and subsequently undergo class switching and somatic mutation. Thus, using such a technique, it is possible to produce therapeutically useful IgG, IgA, IgM and IgE antibodies. For an overview of this technology for producing human antibodies, see Lonberg and Huszar, Int. Rev. Immunol. 13:65-93 (1995). For a detailed discussion of this technology for producing human antibodies and human monoclonal antibodies and protocols for producing such antibodies, see, e.g., PCT publications WO 98/24893; WO 92/01047; WO 96/34096; WO 96/33735; European Patent No. 0 598 877; U.S. Pat. Nos. 5,413,923; 5,625,126; 5,633,425; 5,569,825; 5,661,016; 5,545,806; 5,814,318; 5,885,793; 5,916,771; 5,939,598; 6,075,181 and 6,114,598, which are incorporated by reference herein in their entirety. In addition, companies such as Abgenix, Inc. (Freemont, Calif.) and Genpharm (San Jose, Calif.) can be engaged to provide human antibodies directed against a selected antigen using technology similar to that described above.

[0244] Completely human antibodies, which recognize a selected epitope can be generated using a technique referred to as “guided selection.” In this approach a selected non-human monoclonal antibody, e.g., a mouse antibody, is used to guide the selection of a completely human antibody recognizing the same epitope. (Jespers et al., Bio/technology 12:899-903 (1988)).

[0245] Further, antibodies to the polypeptides of the invention can, in turn, be utilized to generate anti-idiotype antibodies that “mimic” polypeptides of the invention using techniques well known to those skilled in the art. (See, e.g., Greenspan & Bona, FASEB J. 7(5):437-444; (1989) and Nissinoff, J. Immunol. 147(8):2429-2438 (1991)). For example, antibodies which bind to and competitively inhibit polypeptide multimerization and/or binding of a polypeptide of the invention to a ligand can be used to generate anti-idiotypes that “mimic” the polypeptide multimerization and/or binding domain and, as a consequence, bind to and neutralize polypeptide and/or its ligand. Such neutralizing anti-idiotypes or Fab fragments of such anti-idiotypes can be used in therapeutic regimens to neutralize polypeptide ligand/receptor. For example, such anti-idiotypic antibodies can be used to bind a polypeptide of the invention and/or to bind its ligand(s)/receptor(s), and thereby block its biological activity. Alternatively, antibodies, which bind to and enhance polypeptide multimerization and/or binding, and/or receptor/ligand multimerization, binding and/or signaling can be used to generate anti-idiotypes that function as agonists of a polypeptide of the invention and/or its ligand/receptor. Such agonistic anti-idiotypes or Fab fragments of such anti-idiotypes can be used in therapeutic regimens as agonists of the polypeptides of the invention or its ligand(s)/receptor(s). For example, such anti-idiotypic antibodies can be used to bind a polypeptide of the invention and/or to bind its ligand(s)/receptor(s), and thereby promote or enhance its biological activity.

[0246] Intrabodies of the invention can be produced using methods known in the art, such as those disclosed and reviewed in Chen et al., Hum. Gene Ther. 5:595-601 (1994); Marasco, W. A., Gene Ther. 4:11-15 (1997); Rondon and Marasco, Annu. Rev. Microbiol. 51:257-283 (1997); Proba et al., J. Mol. Biol. 275:245-253 (1998); Cohen et al., Oncogene 17:2445-2456 (1998); Ohage and Steipe, J. Mol. Biol. 291:1119-1128 (1999); Ohage et al., J. Mol. Biol. 291:1129-1134 (1999); Wirtz and Steipe, Protein Sci. 8:2245-2250 (1999); Zhu et al., J. Immunol. Methods 231:207-222 (1999); and references cited therein.

[0247] Polynucleotides Encoding Antibodies

[0248] The invention further provides polynucleotides comprising a nucleotide sequence encoding an antibody of the invention and fragments thereof. The invention also encompasses polynucleotides that hybridize under stringent or alternatively, under lower stringency hybridization conditions, e.g., as defined supra, to polynucleotides that encode an antibody, preferably, that specifically binds to a polypeptide of the invention, preferably, an antibody that binds to a polypeptide having the amino acid sequence of SEQ ID NO:Y, to a polypeptide encoded by a portion of SEQ ID NO:X as defined in columns 8 and 9 of Table 2, and/or to a polypeptide encoded by the cDNA contained in Clone ID NO:Z.

[0249] The polynucleotides may be obtained, and the nucleotide sequence of the polynucleotides determined, by any method known in the art. For example, if the nucleotide sequence of the antibody is known, a polynucleotide encoding the antibody may be assembled from chemically synthesized oligonucleotides (e.g., as described in Kutmeier et al., BioTechniques 17:242 (1994)), which, briefly, involves the synthesis of overlapping oligonucleotides containing portions of the sequence encoding the antibody, annealing and ligating of those oligonucleotides, and then amplification of the ligated oligonucleotides by PCR.

[0250] Alternatively, a polynucleotide encoding an antibody may be generated from nucleic acid from a suitable source. If a clone containing a nucleic acid encoding a particular antibody is not available, but the sequence of the antibody molecule is known, a nucleic acid encoding the immunoglobulin may be chemically synthesized or obtained from a suitable source (e.g., an antibody cDNA library, or a cDNA library generated from, or nucleic acid, preferably poly A+ RNA, isolated from, any tissue or cells expressing the antibody, such as hybridoma cells selected to express an antibody of the invention) by PCR amplification using synthetic primers hybridizable to the 3′ and 5′ ends of the sequence or by cloning using an oligonucleotide probe specific for the particular gene sequence to identify, e.g., a cDNA clone from a cDNA library that encodes the antibody. Amplified nucleic acids generated by PCR may then be cloned into replicable cloning vectors using any method well known in the art.

[0251] Once the nucleotide sequence and corresponding amino acid sequence of the antibody is determined, the nucleotide sequence of the antibody may be manipulated using methods well known in the art for the manipulation of nucleotide sequences, e.g., recombinant DNA techniques, site directed mutagenesis, PCR, etc. (see, for example, the techniques described in Sambrook et al., 1990, Molecular Cloning, A Laboratory Manual, 2d Ed., Cold Spring Harbor Laboratory, Cold Spring Harbor, N.Y. and Ausubel et al., eds., 1998, Current Protocols in Molecular Biology, John Wiley & Sons, NY, which are both incorporated by reference herein in their entireties ), to generate antibodies having a different amino acid sequence, for example to create amino acid substitutions, deletions, and/or insertions.

[0252] In a specific embodiment, the amino acid sequence of the heavy and/or light chain variable domains may be inspected to identify the sequences of the complementarity determining regions (CDRs) by methods that are well know in the art, e.g., by comparison to known amino acid sequences of other heavy and light chain variable regions to determine the regions of sequence hypervariability. Using routine recombinant DNA techniques, one or more of the CDRs may be inserted within framework regions, e.g., into human framework regions to humanize a non-human antibody, as described supra. The framework regions may be naturally occurring or consensus framework regions, and preferably human framework regions (see, e.g., Chothia et al., J. Mol. Biol. 278: 457-479 (1998) for a listing of human framework regions). Preferably, the polynucleotide generated by the combination of the framework regions and CDRs encodes an antibody that specifically binds a polypeptide of the invention. Preferably, as discussed supra, one or more amino acid substitutions may be made within the framework regions, and, preferably, the amino acid substitutions improve binding of the antibody to its antigen. Additionally, such methods may be used to make amino acid substitutions or deletions of one or more variable region cysteine residues participating in an intrachain disulfide bond to generate antibody molecules lacking one or more intrachain disulfide bonds. Other alterations to the polynucleotide are encompassed by the present invention and within the skill of the art.

[0253] In addition, techniques developed for the production of “chimeric antibodies” (Morrison et al., Proc. Natl. Acad. Sci. 81:851-855 (1984); Neuberger et al., Nature 312:604-608 (1984); Takeda et al., Nature 314:452-454 (1985)) by splicing genes from a mouse antibody molecule of appropriate antigen specificity together with genes from a human antibody molecule of appropriate biological activity can be used. As described supra, a chimeric antibody is a molecule in which different portions are derived from different animal species, such as those having a variable region derived from a murine mAb and a human immunoglobulin constant region, e.g., humanized antibodies.

[0254] Alternatively, techniques described for the production of single chain antibodies (U.S. Pat. No. 4,946,778; Bird, Science 242:423-42 (1988); Huston et al., Proc. Natl. Acad. Sci. USA 85:5879-5883 (1988); and Ward et al., Nature 334:544-54 (1989)) can be adapted to produce single chain antibodies. Single chain antibodies are formed by linking the heavy and light chain fragments of the Fv region via an amino acid bridge, resulting in a single chain polypeptide. Techniques for the assembly of functional Fv fragments in E. coli may also be used (Skerra et al., Science 242:1038-1041 (1988)).

[0255] Methods of Producing Antibodies

[0256] The antibodies of the invention can be produced by any method known in the art for the synthesis of antibodies, in particular, by chemical synthesis or preferably, by recombinant expression techniques. Methods of producing antibodies include, but are not limited to, hybridoma technology, EBV transformation, and other methods discussed herein as well as through the use recombinant DNA technology, as discussed below.

[0257] Recombinant expression of an antibody of the invention, or fragment, derivative or analog thereof, (e.g., a heavy or light chain of an antibody of the invention or a single chain antibody of the invention), requires construction of an expression vector containing a polynucleotide that encodes the antibody. Once a polynucleotide encoding an antibody molecule or a heavy or light chain of an antibody, or portion thereof (preferably containing the heavy or light chain variable domain), of the invention has been obtained, the vector for the production of the antibody molecule may be produced by recombinant DNA technology using techniques well known in the art. Thus, methods for preparing a protein by expressing a polynucleotide containing an antibody encoding nucleotide sequence are described herein. Methods which are well known to those skilled in the art can be used to construct expression vectors containing antibody coding sequences and appropriate transcriptional and translational control signals. These methods include, for example, in vitro recombinant DNA techniques, synthetic techniques, and in vivo genetic recombination. The invention, thus, provides replicable vectors comprising a nucleotide sequence encoding an antibody molecule of the invention, or a heavy or light chain thereof, or a heavy or light chain variable domain, operably linked to a promoter. Such vectors may include the nucleotide sequence encoding the constant region of the antibody molecule (see, e.g., PCT Publication WO 86/05807; PCT Publication WO 89/01036; and U.S. Pat. No. 5,122,464) and the variable domain of the antibody may be cloned into such a vector for expression of the entire heavy or light chain.

[0258] The expression vector is transferred to a host cell by conventional techniques and the transfected cells are then cultured by conventional techniques to produce an antibody of the invention. Thus, the invention includes host cells containing a polynucleotide encoding an antibody of the invention, or a heavy or light chain thereof, or a single chain antibody of the invention, operably linked to a heterologous promoter. In preferred embodiments for the expression of double-chained antibodies, vectors encoding both the heavy and light chains may be co-expressed in the host cell for expression of the entire immunoglobulin molecule, as detailed below.

[0259] A variety of host-expression vector systems may be utilized to express the antibody molecules of the invention. Such host-expression systems represent vehicles by which the coding sequences of interest may be produced and subsequently purified, but also represent cells which may, when transformed or transfected with the appropriate nucleotide coding sequences, express an antibody molecule of the invention in situ. These include but are not limited to microorganisms such as bacteria (e.g., E. coli, B. subtilis) transformed with recombinant bacteriophage DNA, plasmid DNA or cosmid DNA expression vectors containing antibody coding sequences; yeast (e.g., Saccharomyces, Pichia) transformed with recombinant yeast expression vectors containing antibody coding sequences; insect cell systems infected with recombinant virus expression vectors (e.g., baculovirus) containing antibody coding sequences; plant cell systems infected with recombinant virus expression vectors (e.g., cauliflower mosaic virus, CaMV; tobacco mosaic virus, TMV) or transformed with recombinant plasmid expression vectors (e.g., Ti plasmid) containing antibody coding sequences; or mammalian cell systems (e.g., COS, CHO, BHK, 293, 3T3 cells) harboring recombinant expression constructs containing promoters derived from the genome of mammalian cells (e.g., metallothionein promoter) or from mammalian viruses (e.g., the adenovirus late promoter; the vaccinia virus 7.5K promoter). Preferably, bacterial cells such as Escherichia coli, and more preferably, eukaryotic cells, especially for the expression of whole recombinant antibody molecule, are used for the expression of a recombinant antibody molecule. For example, mammalian cells such as Chinese hamster ovary cells (CHO), in conjunction with a vector such as the major intermediate early gene promoter element from human cytomegalovirus is an effective expression system for antibodies (Foecking et al., Gene 45:101 (1986); Cockett et al., Bio/Technology 8:2 (1990)).

[0260] In bacterial systems, a number of expression vectors may be advantageously selected depending upon the use intended for the antibody molecule being expressed. For example, when a large quantity of such a protein is to be produced, for the generation of pharmaceutical compositions of an antibody molecule, vectors which direct the expression of high levels of fusion protein products that are readily purified may be desirable. Such vectors include, but are not limited, to the E. coli expression vector pUR278 (Ruther et al., EMBO J. 2:1791 (1983)), in which the antibody coding sequence may be ligated individually into the vector in frame with the lac Z coding region so that a fusion protein is produced; pIN vectors (Inouye & Inouye, Nucleic Acids Res. 13:3101-3109 (1985); Van Heeke & Schuster, J. Biol. Chem. 24:5503-5509 (1989)); and the like. pGEX vectors may also be used to express foreign polypeptides as fusion proteins with glutathione S-transferase (GST). In general, such fusion proteins are soluble and can easily be purified from lysed cells by adsorption and binding to matrix glutathione-agarose beads followed by elution in the presence of free glutathione. The pGEX vectors are designed to include thrombin or factor Xa protease cleavage sites so that the cloned target gene product can be released from the GST moiety.

[0261] In an insect system, Autographa californica nuclear polyhedrosis virus (AcNPV) is used as a vector to express foreign genes. The virus grows in Spodoptera frugiperda cells. The antibody coding sequence may be cloned individually into non-essential regions (for example the polyhedrin gene) of the virus and placed under control of an AcNPV promoter (for example the polyhedrin promoter).

[0262] In mammalian host cells, a number of viral-based expression systems may be utilized. In cases where an adenovirus is used as an expression vector, the antibody coding sequence of interest may be ligated to an adenovirus transcription/translation control complex, e.g., the late promoter and tripartite leader sequence. This chimeric gene may then be inserted in the adenovirus genome by in vitro or in vivo recombination. Insertion in a non-essential region of the viral genome (e.g., region E1 or E3) will result in a recombinant virus that is viable and capable of expressing the antibody molecule in infected hosts. (e.g., see Logan & Shenk, Proc. Natl. Acad. Sci. USA 81:355-359 (1984)). Specific initiation signals may also be required for efficient translation of inserted antibody coding sequences. These signals include the ATG initiation codon and adjacent sequences. Furthermore, the initiation codon must be in phase with the reading frame of the desired coding sequence to ensure translation of the entire insert. These exogenous translational control signals and initiation codons can be of a variety of origins, both natural and synthetic. The efficiency of expression may be enhanced by the inclusion of appropriate transcription enhancer elements, transcription terminators, etc. (see Bittner et al., Methods in Enzymol. 153:51-544 (1987)).

[0263] In addition, a host cell strain may be chosen which modulates the expression of the inserted sequences, or modifies and processes the gene product in the specific fashion desired. Such modifications (e.g., glycosylation) and processing (e.g., cleavage) of protein products may be important for the function of the protein. Different host cells have characteristic and specific mechanisms for the post-translational processing and modification of proteins and gene products. Appropriate cell lines or host systems can be chosen to ensure the correct modification and processing of the foreign protein expressed. To this end, eukaryotic host cells which possess the cellular machinery for proper processing of the primary transcript, glycosylation, and phosphorylation of the gene product may be used. Such mammalian host cells include but are not limited to CHO, VERY, BHK, Hela, COS, MDCK, 293, 3T3, WI38, and in particular, breast cancer cell lines such as, for example, BT483, Hs578T, HTB2, BT20 and T47D, and normal mammary gland cell line such as, for example, CRL7030 and Hs578Bst.

[0264] For long-term, high-yield production of recombinant proteins, stable expression is preferred. For example, cell lines, which stably express the antibody molecule may be engineered. Rather than using expression vectors which contain viral origins of replication, host cells can be transformed with DNA controlled by appropriate expression control elements (e.g., promoter, enhancer, sequences, transcription terminators, polyadenylation sites, etc.), and a selectable marker. Following the introduction of the foreign DNA, engineered cells may be allowed to grow for 1-2 days in an enriched media, and then are switched to a selective media. The selectable marker in the recombinant plasmid confers resistance to the selection and allows cells to stably integrate the plasmid into their chromosomes and grow to form foci which in turn can be cloned and expanded into cell lines. This method may advantageously be used to engineer cell lines, which express the antibody molecule. Such engineered cell lines may be particularly useful in screening and evaluation of compounds that interact directly or indirectly with the antibody molecule.

[0265] A number of selection systems may be used, including but not limited to the herpes simplex virus thymidine kinase (Wigler et al., Cell 11:223 (1977)), hypoxanthine-guanine phosphoribosyltransferase (Szybalska & Szybalski, Proc. Natl. Acad. Sci. USA 48:202 (1992)), and adenine phosphoribosyltransferase (Lowy et al., Cell 22:817 (1980)) genes can be employed in tk-, hgprt- or aprt-cells, respectively. Also, antimetabolite resistance can be used as the basis of selection for the following genes: dhfr, which confers resistance to methotrexate (Wigler et al., Natl. Acad. Sci. USA 77:357 (1980); O'Hare et al., Proc. Natl. Acad. Sci. USA 78:1527 (1981)); gpt, which confers resistance to mycophenolic acid (Mulligan & Berg, Proc. Natl. Acad. Sci. USA 78:2072 (1981)); neo, which confers resistance to the aminoglycoside G-418 Clinical Pharmacy 12:488-505; Wu and Wu, Biotherapy 3:87-95 (1991); Tolstoshev, Ann. Rev. Pharmacol. Toxicol. 32:573-596 (1993); Mulligan, Science 260:926-932 (1993); and Morgan and Anderson, Ann. Rev. Biochem. 62:191-217 (1993); TIB TECH 11(5):155-215 (1993)); and hygro, which confers resistance to hygromycin (Santerre et al., Gene 30:147 (1984)). Methods commonly known in the art of recombinant DNA technology may be routinely applied to select the desired recombinant clone, and such methods are described, for example, in Ausubel et al. (eds.), Current Protocols in Molecular Biology, John Wiley & Sons, NY (1993); Kriegler, Gene Transfer and Expression, A Laboratory Manual, Stockton Press, NY (1990); and in Chapters 12 and 13, Dracopoli et al. (eds), Current Protocols in Human Genetics, John Wiley & Sons, NY (1994); Colberre-Garapin et al., J. Mol. Biol. 150:1 (1981), which are incorporated by reference herein in their entireties.

[0266] The expression levels of an antibody molecule can be increased by vector amplification (for a review, see Bebbington and Hentschel, The use of vectors based on gene amplification for the expression of cloned genes in mammalian cells in DNA cloning, Vol. 3. (Academic Press, New York, 1987)). When a marker in the vector system expressing antibody is amplifiable, increase in the level of inhibitor present in culture of host cell will increase the number of copies of the marker gene. Since the amplified region is associated with the antibody gene, production of the antibody will also increase (Crouse et al., Mol. Cell. Biol. 3:257 (1983)).

[0267] Vectors, which use glutamine synthase (GS) or DHFR as the selectable markers can be amplified in the presence of the drugs methionine sulphoximine or methotrexate, respectively. An advantage of glutamine synthase based vectors is the availabilty of cell lines (e.g., the murine myeloma cell line, NSO) which are glutamine synthase negative. Glutamine synthase expression systems can also function in glutamine synthase expressing cells (e.g., Chinese Hamster Ovary (CHO) cells) by providing additional inhibitor to prevent the functioning of the endogenous gene. A glutamine synthase expression system and components thereof are detailed in PCT publications: WO87/04462; WO86/05807; WO89/01036; WO89/10404; and WO91/06657, which are incorporated in their entireties by reference herein. Additionally, glutamine synthase expression vectors that may be used according to the present invention are commercially available from suplliers, including, for example Lonza Biologics, Inc. (Portsmouth, N.H.). Expression and production of monoclonal antibodies using a GS expression system in murine myeloma cells is described in Bebbington et al., Bio/technology 10:169(1992) and in Biblia and Robinson Biotechnol. Prog. 11:1 (1995) which are incorporated in their entirities by reference herein.

[0268] The host cell may be co-transfected with two expression vectors of the invention, the first vector encoding a heavy chain derived polypeptide and the second vector encoding a light chain derived polypeptide. The two vectors may contain identical selectable markers which enable equal expression of heavy and light chain polypeptides. Alternatively, a single vector may be used which encodes, and is capable of expressing, both heavy and light chain polypeptides. In such situations, the light chain should be placed before the heavy chain to avoid an excess of toxic free heavy chain (Proudfoot, Nature 322:52 (1986); Kohler, Proc. Natl. Acad. Sci. USA 77:2197 (1980)). The coding sequences for the heavy and light chains may comprise cDNA or genomic DNA.

[0269] Once an antibody molecule of the invention has been produced by an animal, chemically synthesized, or recombinantly expressed, it may be purified by any method known in the art for purification of an immunoglobulin molecule, for example, by chromatography (e.g., ion exchange, affinity, particularly by affinity for the specific antigen after Protein A, and sizing column chromatography), centrifugation, differential solubility, or by any other standard technique for the purification of proteins. In addition, the antibodies of the present invention or fragments thereof can be fused to heterologous polypeptide sequences described herein or otherwise known in the art, to facilitate purification.

[0270] The present invention encompasses antibodies recombinantly fused or chemically conjugated (including both covalently and non-covalently conjugations) to a polypeptide (or portion thereof, preferably at least 10, 20, 30, 40, 50, 60, 70, 80, 90 or 100 amino acids of the polypeptide) of the present invention to generate fusion proteins. The fusion does not necessarily need to be direct, but may occur through linker sequences. The antibodies may be specific for antigens other than polypeptides (or portion thereof, preferably at least 10, 20, 30, 40, 50, 60, 70, 80, 90 or 100 amino acids of the polypeptide) of the present invention. For example, antibodies may be used to target the polypeptides of the present invention to particular cell types, either in vitro or in vivo, by fusing or conjugating the polypeptides of the present invention to antibodies specific for particular cell surface receptors. Antibodies fused or conjugated to the polypeptides of the present invention may also be used in in vitro immunoassays and purification methods using methods known in the art. See e.g., Harbor et al., supra, and PCT publication WO 93/21232; EP 439,095; Naramura et al., Immunol. Lett. 39:91-99 (1994); U.S. Pat. No. 5,474,981; Gillies et al., PNAS 89:1428-1432 (1992); Fell et al., J. Immunol. 146:2446-2452 (1991), which are incorporated by reference in their entireties.

[0271] The present invention further includes compositions comprising the polypeptides of the present invention fused or conjugated to antibody domains other than the variable regions. For example, the polypeptides of the present invention may be fused or conjugated to an antibody Fc region, or portion thereof. The antibody portion fused to a polypeptide of the present invention may comprise the constant region, hinge region, CH1 domain, CH2 domain, and CH3 domain or any combination of whole domains or portions thereof. The polypeptides may also be fused or conjugated to the above antibody portions to form multimers. For example, Fc portions fused to the polypeptides of the present invention can form dimers through disulfide bonding between the Fc portions. Higher multimeric forms can be made by fusing the polypeptides to portions of IgA and IgM. Methods for fusing or conjugating the polypeptides of the present invention to antibody portions are known in the art. See, e.g., U.S. Pat. Nos. 5,336,603; 5,622,929; 5,359,046; 5,349,053; 5,447,851; 5,112,946; EP 307,434; EP 367,166; PCT publications WO 96/04388; WO 91/06570; Ashkenazi et al., Proc. Natl. Acad. Sci. USA 88:10535-10539 (1991); Zheng et al., J. Immunol. 154:5590-5600 (1995); and Vil et al., Proc. Natl. Acad. Sci. USA 89:11337-11341 (1992) (said references incorporated by reference in their entireties).

[0272] As discussed, supra, the polypeptides corresponding to a polypeptide, polypeptide fragment, or a variant of SEQ ID NO:Y may be fused or conjugated to the above antibody portions to increase the in vivo half life of the polypeptides or for use in immunoassays using methods known in the art. Further, the polypeptides corresponding to SEQ ID NO:Y may be fused or conjugated to the above antibody portions to facilitate purification. One reported example describes chimeric proteins consisting of the first two domains of the human CD4-polypeptide and various domains of the constant regions of the heavy or light chains of mammalian immunoglobulins. See EP 394,827; Traunecker et al., Nature 331:84-86 (1988). The polypeptides of the present invention fused or conjugated to an antibody having disulfide-linked dimeric structures (due to the IgG) may also be more efficient in binding and neutralizing other molecules, than the monomeric secreted protein or protein fragment alone. See, for example, Fountoulakis et al., J. Biochem. 270:3958-3964 (1995). In many cases, the Fc part in a fusion protein is beneficial in therapy and diagnosis, and thus can result in, for example, improved pharmacokinetic properties. See, for example, EP A 232,262. Alternatively, deleting the Fe part after the fusion protein has been expressed, detected, and purified, would be desired. For example, the Fc portion may hinder therapy and diagnosis if the fusion protein is used as an antigen for immunizations. In drug discovery, for example, human proteins, such as hIL-5, have been fused with Fe portions for the purpose of high-throughput screening assays to identify antagonists of hIL-5. (See, Bennett et al., J. Molecular Recognition 8:52-58 (1995); Johanson et al., J. Biol. Chem. 270:9459-9471 (1995)).

[0273] Moreover, the antibodies or fragments thereof of the present invention can be fused to marker sequences, such as a peptide to facilitate purification. In preferred embodiments, the marker amino acid sequence is a hexa-histidine peptide, such as the tag provided in a pQE vector (QIAGEN, Inc., 9259 Eton Avenue, Chatsworth, Calif., 91311), among others, many of which are commercially available. As described in Gentz et al., Proc. Natl. Acad. Sci. USA 86:821-824 (1989), for instance, hexa-histidine provides for convenient purification of the fusion protein. Other peptide tags useful for purification include, but are not limited to, the “HA” tag, which corresponds to an epitope derived from the influenza hemagglutinin protein (Wilson et al., Cell 37:767 (1984)) and the “flag” tag.

[0274] The present invention further encompasses antibodies or fragments thereof conjugated to a diagnostic or therapeutic agent. The antibodies can be used diagnostically to, for example, monitor the development or progression of a tumor as part of a clinical testing procedure to, e.g., determine the efficacy of a given treatment regimen. Detection can be facilitated by coupling the antibody to a detectable substance. Examples of detectable substances include various enzymes, prosthetic groups, fluorescent materials, luminescent materials, bioluminescent materials, radioactive materials, positron emitting metals using various positron emission tomographies, and nonradioactive paramagnetic metal ions. The detectable substance may be coupled or conjugated either directly to the antibody (or fragment thereof) or indirectly, through an intermediate (such as, for example, a linker known in the art) using techniques known in the art. See, for example, U.S. Pat. No. 4,741,900 for metal ions which can be conjugated to antibodies for use as diagnostics according to the present invention.

[0275] Further, an antibody or fragment thereof may be conjugated to a therapeutic moiety such as a cytotoxin, e.g., a cytostatic or cytocidal agent, a therapeutic agent or a radioactive metal ion, e.g., alpha-emitters such as, for example, 213Bi. A cytotoxin or cytotoxic agent includes any agent that is detrimental to cells. Examples include paclitaxol, cytochalasin B, gramicidin D, ethidium bromide, emetine, mitomycin, etoposide, tenoposide, vincristine, vinblastine, colchicin, doxorubicin, daunorubicin, dihydroxy anthracin dione, mitoxantrone, mithramycin, actinomycin D, 1-dehydrotestosterone, glucocorticoids, procaine, tetracaine, lidocaine, propranolol, and puromycin and analogs or homologs thereof. Therapeutic agents include, but are not limited to, antimetabolites (e.g., methotrexate, 6-mercaptopurine, 6-thioguanine, cytarabine, 5-fluorouracil decarbazine), alkylating agents (e.g., mechlorethamine, thioepa chlorambucil, melphalan, carmustine (BSNU) and lomustine (CCNU), cyclothosphamide, busulfan, dibromomannitol, streptozotocin, mitomycin C, and cis-dichlorodiamine platinum (II) (DDP) cisplatin), anthracyclines (e.g., daunorubicin (formerly daunomycin) and doxorubicin), antibiotics (e.g., dactinomycin (formerly actinomycin), bleomycin, mithramycin, and anthramycin (AMC)), and anti-mitotic agents (e.g., vincristine and vinblastine).

[0276] The conjugates of the invention can be used for modifying a given biological response, the therapeutic agent or drug moiety is not to be construed as limited to classical chemical therapeutic agents. For example, the drug moiety may be a protein or polypeptide possessing a desired biological activity. Such proteins may include, for example, a toxin such as abrin, ricin A, pseudomonas exotoxin, or diphtheria toxin; a protein such as tumor necrosis factor, a-interferon, β-interferon, nerve growth factor, platelet derived growth factor, tissue plasminogen activator, an apoptotic agent, e.g., TNF-alpha, TNF-beta, AIM I (See, International Publication No. WO 97/33899), AIM II (See, International Publication No. WO 97/34911), Fas Ligand (Takahashi et al., Int. Immunol., 6:1567-1574 (1994)), VEGI (See, International Publication No. WO 99/23105), a thrombotic agent or an anti-angiogenic agent, e.g., angiostatin or endostatin; or, biological response modifiers such as, for example, lymphokines, interleukin-1 (“IL-1”), interleukin-2 (“IL-2”), interleukin-6 (“IL-6”), granulocyte macrophage colony stimulating factor (“GM-CSF”), granulocyte colony stimulating factor (“G-CSF”), or other growth factors.

[0277] Antibodies may also be attached to solid supports, which are particularly useful for immunoassays or purification of the target antigen. Such solid supports include, but are not limited to, glass, cellulose, polyacrylamide, nylon, polystyrene, polyvinyl chloride or polypropylene.

[0278] Techniques for conjugating such therapeutic moiety to antibodies are well known. See, for example., Arnon et al., “Monoclonal Antibodies For Immunotargeting Of Drugs In Cancer Therapy”, in Monoclonal Antibodies And Cancer Therapy, Reisfeld et al. (eds.), pp. 243-56 (Alan R. Liss, Inc. 1985); Hellstrom et al., “Antibodies For Drug Delivery”, in Controlled Drug Delivery (2nd Ed.), Robinson et al. (eds.), pp. 623-53 (Marcel Dekker, Inc. 1987); Thorpe, “Antibody Carriers Of Cytotoxic Agents In Cancer Therapy: A Review”, in Monoclonal Antibodies '84: Biological And Clinical Applications, Pinchera et al. (eds.), pp. 475-506 (1985); “Analysis, Results, And Future Prospective Of The Therapeutic Use Of Radiolabeled Antibody In Cancer Therapy”, in Monoclonal Antibodies For Cancer Detection And Therapy, Baldwin et al. (eds.), pp. 303-16 (Academic Press 1985), and Thorpe et al., “The Preparation And Cytotoxic Properties Of Antibody-Toxin Conjugates”, Immunol. Rev. 62:119-58 (1982).

[0279] Alternatively, an antibody can be conjugated to a second antibody to form an antibody heteroconjugate as described by Segal in U.S. Pat. No. 4,676,980, which is incorporated herein by reference in its entirety.

[0280] An antibody, with or without a therapeutic moiety conjugated to it, administered alone or in combination with cytotoxic factor(s) and/or cytokine(s) can be used as a therapeutic.

[0281] Immunophenotyping

[0282] The antibodies of the invention may be utilized for immunophenotyping of cell lines and biological samples. Translation products of the genes of the present invention may be useful as cell specific markers, or more specifically as cellular markers that are differentially expressed at various stages of differentiation and/or maturation of particular cell types. Monoclonal antibodies directed against a specific epitope, or combination of epitopes, will allow for the screening of cellular populations expressing the marker. Various techniques can be utilized using monoclonal antibodies to screen for cellular populations expressing the marker(s), and include magnetic separation using antibody-coated magnetic beads, “panning” with antibody attached to a solid matrix (i.e., plate), and flow cytometry (See, e.g., U.S. Pat. No. 5,985,660; and Morrison et al., Cell, 96:737-49 (1999)).

[0283] These techniques allow for the screening of particular populations of cells, such as might be found with hematological malignancies (i.e. minimal residual disease (MRD) in acute leukemic patients) and “non-self” cells in transplantations to prevent Graft-versus-Host Disease (GVHD). Alternatively, these techniques allow for the screening of hematopoietic stem and progenitor cells capable of undergoing proliferation and/or differentiation, as might be found in human umbilical cord blood.

[0284] Assays for Antibody Binding

[0285] The antibodies of the invention may be assayed for immunospecific binding by any method known in the art. The immunoassays which can be used include but are not limited to competitive and non-competitive assay systems using techniques such as western blots, radioimmunoassays, ELISA (enzyme linked immunosorbent assay), “sandwich” immunoassays, immunoprecipitation assays, precipitin reactions, gel diffusion precipitin reactions, immunodiffusion assays, agglutination assays, complement-fixation assays, immunoradiometric assays, fluorescent immunoassays, and protein A immunoassays, to name but a few. Such assays are routine and well known in the art (see, e.g., Ausubel et al, eds, 1994, Current Protocols in Molecular Biology, Vol. 1, John Wiley & Sons, Inc., New York, which is incorporated by reference herein in its entirety). Exemplary immunoassays are described briefly below (but are not intended by way of limitation).

[0286] Immunoprecipitation protocols generally comprise lysing a population of cells in a lysis buffer such as RIPA buffer (1% NP-40 or Triton X-100, 1% sodium deoxycholate, 0.1% SDS, 0.15 M NaCl, 0.01 M sodium phosphate at pH 7.2, 1% Trasylol) supplemented with protein phosphatase and/or protease inhibitors (e.g., EDTA, PMSF, aprotinin, sodium vanadate), adding the antibody of interest to the cell lysate, incubating for a period of time (e.g., 1-4 hours) at 4° C., adding protein A and/or protein G sepharose beads to the cell lysate, incubating for about an hour or more at 4° C., washing the beads in lysis buffer and resuspending the beads in SDS/sample buffer. The ability of the antibody of interest to immunoprecipitate a particular antigen can be assessed by, e.g., western blot analysis. One of skill in the art would be knowledgeable as to the parameters that can be modified to increase the binding of the antibody to an antigen and decrease the background (e.g., pre-clearing the cell lysate with sepharose beads). For further discussion regarding immunoprecipitation protocols see, e.g., Ausubel et al., eds., (1994), Current Protocols in Molecular Biology, Vol. 1, John Wiley & Sons, Inc., New York, section 10.16.1.

[0287] Western blot analysis generally comprises preparing protein samples, electrophoresis of the protein samples in a polyacrylamide gel (e.g., 8%-20% SDS-PAGE depending on the molecular weight of the antigen), transferring the protein sample from the polyacrylamide gel to a membrane such as nitrocellulose, PVDF or nylon, blocking the membrane in blocking solution (e.g., PBS with 3% BSA or non-fat milk), washing the membrane in washing buffer (e.g., PBS-Tween 20), blocking the membrane with primary antibody (the antibody of interest) diluted in blocking buffer, washing the membrane in washing buffer, blocking the membrane with a secondary antibody (which recognizes the primary antibody, e.g., an anti-human antibody) conjugated to an enzymatic substrate (e.g., horseradish peroxidase or alkaline phosphatase) or radioactive molecule (e.g., 32P or 125I) diluted in blocking buffer, washing the membrane in wash buffer, and detecting the presence of the antigen. One of skill in the art would be knowledgeable as to the parameters that can be modified to increase the signal detected and to reduce the background noise. For further discussion regarding western blot protocols see, e.g., Ausubel et al., eds., (1994), Current Protocols in Molecular Biology, Vol. 1, John Wiley & Sons, Inc., New York, section 10.8.1.

[0288] ELISAs comprise preparing antigen, coating the well of a 96 well microtiter plate with the antigen, adding the antibody of interest conjugated to a detectable compound such as an enzymatic substrate (e.g., horseradish peroxidase or alkaline phosphatase) to the well and incubating for a period of time, and detecting the presence of the antigen. In ELISAs the antibody of interest does not have to be conjugated to a detectable compound; instead, a second antibody (which recognizes the antibody of interest) conjugated to a detectable compound may be added to the well. Further, instead of coating the well with the antigen, the antibody may be coated to the well. In this case, a second antibody conjugated to a detectable compound may be added following the addition of the antigen of interest to the coated well. One of skill in the art would be knowledgeable as to the parameters that can be modified to increase the signal detected as well as other variations of ELISAs known in the art. For further discussion regarding ELISAs see, e.g., Ausubel et al., eds., (1994), Current Protocols in Molecular Biology, Vol. 1, John Wiley & Sons, Inc., New York, section 1 1.2.1.

[0289] The binding affinity of an antibody to an antigen and the off-rate of an antibody-antigen interaction can be determined by competitive binding assays. One example of a competitive binding assay is a radioimmunoassay comprising the incubation of labeled antigen (e.g., 3H or 125I) with the antibody of interest in the presence of increasing amounts of unlabeled antigen, and the detection of the antibody bound to the labeled antigen. The affinity of the antibody of interest for a particular antigen and the binding off-rates can be determined from the data by scatchard plot analysis. Competition with a second antibody can also be determined using radioimmunoassays. In this case, the antigen is incubated with antibody of interest conjugated to a labeled compound (e.g., 3H or 125I) in the presence of increasing amounts of an unlabeled second antibody.

[0290] Antibodies of the invention may be characterized using immunocytochemisty methods on cells (e.g., mammalian cells, such as CHO cells) transfected with a vector enabling the expression of an ovarian and/or breast cancer antigen or with vector alone using techniques commonly known in the art. Antibodies that bind ovarian and/or breast cancer antigen transfected cells, but not vector-only transfected cells, are ovarian and/or breast cancer antigen specific.

[0291] Therapeutic Uses

[0292] The present invention is further directed to antibody-based therapies which involve administering antibodies of the invention to an animal, preferably a mammal, and most preferably a human, patient for treating one or more of the disclosed diseases, disorders, or conditions. Therapeutic compounds of the invention include, but are not limited to, antibodies of the invention (including fragments, analogs and derivatives thereof as described herein) and nucleic acids encoding antibodies of the invention (including fragments, analogs and derivatives thereof and anti-idiotypic antibodies as described herein). The antibodies of the invention can be used to treat, inhibit or prevent diseases, disorders or conditions associated with aberrant expression and/or activity of a polypeptide of the invention, including, but not limited to, any one or more of the diseases, disorders, or conditions described herein. The treatment and/or prevention of diseases, disorders, or conditions associated with aberrant expression and/or activity of a polypeptide of the invention includes, but is not limited to, alleviating symptoms associated with those diseases, disorders or conditions. Antibodies of the invention may be provided in pharmaceutically acceptable compositions as known in the art or as described herein.

[0293] In a specific and preferred embodiment, the present invention is directed to antibody-based therapies which involve administering antibodies of the invention to an animal, preferably a mammal, and most preferably a human, patient for treating one or more of the diseases, disorders, or conditions of ovarian and/or breast cancer, including, but not limited to, cancers of the ovaries, such as primary and secondary cancerous growth, endometrioid carcinoma of the ovary, ovarian papillary serous adenocarcinoma, ovarian mucinous adenocarcinoma, and ovarian Krukenberg tumors; and cancers of the breast, such as in situ carcinomas (e.g., ductal carcinoma in situ, Paget's disease, and lobular carcinoma in situ), invasive carcinomas (e.g., invasive ductal carcinoma, invasive lobular carcinoma, medullary carcinoma, colloid (mucinous) carcinoma, tubular carcinoma, and invasive papillary carcinoma), and fibroadenoma, pipillary carcinoma, secretory carcinoma, and apocrine carcinoma; and/or as described under “Hyperproliferative Disorders” and “Reprodcutive System Disorders” below. Therapeutic compounds of the invention include, but are not limited to, antibodies of the invention (e.g., antibodies directed to the full length protein expressed on the cell surface of a mammalian cell; antibodies directed to an epitope of an ovarian and/or breast cancer associated polypeptide of the invention (such as, a linear epitope (shown in Table 1A, column 6) or a conformational epitope), including fragments, analogs and derivatives thereof as described herein) and nucleic acids encoding antibodies of the invention (including fragments, analogs and derivatives thereof and anti-idiotypic antibodies as described herein). The antibodies of the invention can be used to treat, inhibit or prevent diseases, disorders or conditions associated with aberrant expression and/or activity of a polypeptide of the invention, including, but not limited to, any one or more of the diseases, disorders, or conditions associated with ovarian and/or breast cancer described herein. The treatment and/or prevention of diseases, disorders, or conditions associated with ovarian and/or breast cancer associated with aberrant expression and/or activity of a polypeptide of the invention includes, but is not limited to, alleviating symptoms associated with those diseases, disorders or conditions. Antibodies of the invention may be provided in pharmaceutically acceptable compositions as known in the art or as described herein.

[0294] A summary of the ways in which the antibodies of the present invention may be used therapeutically includes binding polynucleotides or polypeptides of the present invention locally or systemically in the body or by direct cytotoxicity of the antibody, e.g. as mediated by complement (CDC) or by effector cells (ADCC). Some of these approaches are described in more detail below. Armed with the teachings provided herein, one of ordinary skill in the art will know how to use the antibodies of the present invention for diagnostic, monitoring or therapeutic purposes without undue experimentation.

[0295] The antibodies of this invention may be advantageously utilized in combination with other monoclonal or chimeric antibodies, or with lymphokines or hematopoietic growth factors (such as, e.g., IL-2, IL-3 and IL-7), for example, which serve to increase the number or activity of effector cells which interact with the antibodies.

[0296] The antibodies of the invention may be administered alone or in combination with other types of treatments (e.g., radiation therapy, chemotherapy, hormonal therapy, immunotherapy and anti-tumor agents). Generally, administration of products of a species origin or species reactivity (in the case of antibodies) that is the same species as that of the patient is preferred. Thus, in a preferred embodiment, human antibodies, fragments derivatives, analogs, or nucleic acids, are administered to a human patient for therapy or prophylaxis.

[0297] It is preferred to use high affinity and/or potent in vivo inhibiting and/or neutralizing antibodies against polypeptides or polynucleotides of the present invention, fragments or regions thereof, for both immunoassays directed to and therapy of disorders related to polynucleotides or polypeptides, including fragments thereof, of the present invention. Such antibodies, fragments, or regions, will preferably have an affinity for polynucleotides or polypeptides of the invention, including fragments thereof. Preferred binding affinities include those with a dissociation constant or Kd less than 5×10⁻² M, 10⁻² M, 5×10⁻³ M, 10⁻³ M, 5×10⁻⁴ M, 10⁻⁴ M, 5×10⁻⁵ M, 10⁻⁵ M, 5×10⁻⁶ M, 10⁻⁶ M, 5×10⁻⁷ M, 10⁻⁷ M, 5×10⁻⁸ M, 10⁻⁸ M, 5×10⁻⁹ M, 10⁻⁹ M, 5×10⁻¹⁰ M, 10⁻¹⁰ M, 5×10⁻¹¹ M, 10⁻¹¹ M, 5×10⁻¹² M, 10⁻¹² M, 5×10⁻¹³ M, 10⁻¹³ M, 5×10⁻¹⁴ M, 10⁻¹⁴ M, 5×10⁻¹⁵ M, and 10⁻¹⁵ M.

[0298] Gene Therapy

[0299] In a specific embodiment, nucleic acids comprising sequences encoding antibodies or functional derivatives thereof, are administered to treat, inhibit or prevent a disease or disorder associated with aberrant expression and/or activity of a polypeptide of the invention, by way of gene therapy. Gene therapy refers to therapy performed by the administration to a subject of an expressed or expressible nucleic acid. In this embodiment of the invention, the nucleic acids produce their encoded protein that mediates a therapeutic effect.

[0300] Any of the methods for gene-therapy available in the art can be used according to the present invention. Exemplary methods are described below.

[0301] For general reviews of the methods of gene therapy, see Goldspiel et al., Clinical Pharmacy 12:488-505 (1993); Wu and Wu, Biotherapy 3:87-95 (1991); Tolstoshev, Ann. Rev. Pharmacol. Toxicol. 32:573-596 (1993); Mulligan, Science 260:926-932 (1993); and Morgan and Anderson, Ann. Rev. Biochem. 62:191-217 (1993); May, TIBTECH 11(5):155-215 (1993). Methods commonly known in the art of recombinant DNA technology which can be used are described in Ausubel et al. (eds.), Current Protocols in Molecular Biology, John Wiley & Sons, NY (1993); and Kriegler, Gene Transfer and Expression, A Laboratory Manual, Stockton Press, NY (1990).

[0302] In a preferred embodiment, the compound comprises nucleic acid sequences encoding an antibody, said nucleic acid sequences being part of expression vectors that express the antibody or fragments or chimeric proteins or heavy or light chains thereof in a suitable host. In particular, such nucleic acid sequences have promoters operably linked to the antibody coding region, said promoter being inducible or constitutive, and, optionally, tissue-specific. In another particular embodiment, nucleic acid molecules are used in which the antibody coding sequences and any other desired sequences are flanked by regions that promote homologous recombination at a desired site in the genome, thus providing for intrachromosomal expression of the antibody encoding nucleic acids (Koller and Smithies, Proc. Natl. Acad. Sci. USA 86:8932-8935 (1989); Zijlstra et al., Nature 342:435-438 (1989). In specific embodiments, the expressed antibody molecule is a single chain antibody; alternatively, the nucleic acid sequences include sequences encoding both the heavy and light chains, or fragments thereof, of the antibody.

[0303] Delivery of the nucleic acids into a patient may be either direct, in which case the patient is directly exposed to the nucleic acid or nucleic acid-carrying vectors, or indirect, in which case, cells are first transformed with the nucleic acids in vitro, then transplanted into the patient. These two approaches are known, respectively, as in vivo or ex vivo gene therapy.

[0304] In a specific embodiment, the nucleic acid sequences are directly administered in vivo, where it is expressed to produce the encoded product. This can be accomplished by any of numerous methods known in the art, e.g., by constructing them as part of an appropriate nucleic acid expression vector and administering it so that they become intracellular, e.g., by infection using defective or attenuated retrovirals or other viral vectors (see U.S. Pat. No. 4,980,286), or by direct injection of naked DNA, or by use of microparticle bombardment (e.g., a gene gun; Biolistic, Dupont), or coating with lipids or cell-surface receptors or transfecting agents, encapsulation in liposomes, microparticles, or microcapsules, or by administering them in linkage to a peptide which is known to enter the nucleus, by administering it in linkage to a ligand subject to receptor-mediated endocytosis (see, e.g., Wu and Wu, J. Biol. Chem. 262:4429-4432 (1987)) (which can be used to target cell types specifically expressing the receptors), etc. In another embodiment, nucleic acid-ligand complexes can be formed in which the ligand comprises a fusogenic viral peptide to disrupt endosomes, allowing the nucleic acid to avoid lysosomal degradation. In yet another embodiment, the nucleic acid can be targeted in vivo for cell specific uptake and expression, by targeting a specific receptor (see, e.g., PCT Publications WO 92/06180; WO 92/22635; WO92/20316; WO93/14188, WO 93/20221). Alternatively, the nucleic acid can be introduced intracellularly and incorporated within host cell DNA for expression, by homologous recombination (Koller and Smithies, Proc. Natl. Acad. Sci. USA 86:8932-8935 (1989); Zijlstra et al., Nature 342:435-438 (1989)).

[0305] In a specific embodiment, viral vectors that contains nucleic acid sequences encoding an antibody of the invention are used. For example, a retroviral vector can be used (see Miller et al., Meth. Enzymol. 217:581-599 (1993)). These retroviral vectors contain the components necessary for the correct packaging of the viral genome and integration into the host cell DNA. The nucleic acid sequences encoding the antibody to be used in gene therapy are cloned into one or more vectors, which facilitates delivery of the gene into a patient. More detail about retroviral vectors can be found in Boesen et al., Biotherapy 6:291-302 (1994), which describes the use of a retroviral vector to deliver the mdr1 gene to hematopoietic stem cells in order to make the stem cells more resistant to chemotherapy. Other references illustrating the use of retroviral vectors in gene therapy are: Clowes et al., J. Clin. Invest. 93:644-651 (1994); Kiem et al., Blood 83:1467-1473 (1994); Salmons and Gunzberg, Human Gene Therapy 4:129-141 (1993); and Grossman and Wilson, Curr. Opin. in Genetics and Devel. 3:110-114 (1993).

[0306] Adenoviruses are other viral vectors that can be used in gene therapy. Adenoviruses are especially attractive vehicles for delivering genes to respiratory epithelia. Adenoviruses naturally infect respiratory epithelia where they cause a mild disease. Other targets for adenovirus-based delivery systems are liver, the central nervous system, endothelial cells, and muscle. Adenoviruses have the advantage of being capable of infecting non-dividing cells. Kozarsky and Wilson, Current Opinion in Genetics and Development 3:499-503 (1993) present a review of adenovirus-based gene therapy. Bout et al., Human Gene Therapy 5:3-10 (1994) demonstrated the use of adenovirus vectors to transfer genes to the respiratory epithelia of rhesus monkeys. Other instances of the use of adenoviruses in gene therapy can be found in Rosenfeld et al., Science 252:431-434 (1991); Rosenfeld et al., Cell 68:143-155 (1992); Mastrangeli et al., J. Clin. Invest. 91:225-234 (1993); PCT Publication WO94/12649; and Wang, et al., Gene Therapy 2:775-783 (1995). In a preferred embodiment, adenovirus vectors are used.

[0307] Adeno-associated virus (AAV) has also been proposed for use in gene therapy (Walsh et al., Proc. Soc. Exp. Biol. Med. 204:289-300 (1993); U.S. Pat. No. 5,436,146).

[0308] Another approach to gene therapy involves transferring a gene to cells in tissue culture by such methods as electroporation, lipofection, calcium phosphate mediated transfection, or viral infection. Usually, the method of transfer includes the transfer of a selectable marker to the cells. The cells are then placed under selection to isolate those cells that have taken up and are expressing the transferred gene. Those cells are then delivered to a patient.

[0309] In this embodiment, the nucleic acid is introduced into a cell prior to administration in vivo of the resulting recombinant cell. Such introduction can be carried out by any method known in the art, including but not limited to transfection, electroporation, microinjection, infection with a viral or bacteriophage vector containing the nucleic acid sequences, cell fusion, chromosome-mediated gene transfer, microcell-mediated gene transfer, spheroplast fusion, etc. Numerous techniques are known in the art for the introduction of foreign genes into cells (see, e.g., Loeffler and Behr, Meth. Enzymol. 217:599-618 (1993); Cohen et al., Meth. Enzymol. 217:618-644 (1993); Cline, Pharmac. Ther. 29:69-92m (1985) and may be used in accordance with the present invention, provided that the necessary developmental and physiological functions of the recipient cells are not disrupted. The technique should provide for the stable transfer of the nucleic acid to the cell, so that the nucleic acid is expressible by the cell and preferably heritable and expressible by its cell progeny.

[0310] The resulting recombinant cells can be delivered to a patient by various methods known in the art. Recombinant blood cells (e.g., hematopoietic stem or progenitor cells) are preferably administered intravenously. The amount of cells envisioned for use depends on the desired effect, patient state, etc., and can be determined by one skilled in the art.

[0311] Cells into which a nucleic acid can be introduced for purposes of gene therapy encompass any desired, available cell type, and include but are not limited to epithelial cells, endothelial cells, keratinocytes, fibroblasts, muscle cells, hepatocytes; blood cells such as T lymphocytes, B lymphocytes, monocytes, macrophages, neutrophils, eosinophils, megakaryocytes, granulocytes; various stem or progenitor cells, in particular hematopoietic stem or progenitor cells, e.g., as obtained from bone marrow, umbilical cord blood, peripheral blood, fetal liver, etc.

[0312] In a preferred embodiment, the cell used for gene therapy is autologous to the patient.

[0313] In an embodiment in which recombinant cells are used in gene therapy, nucleic acid sequences encoding an antibody are introduced into the cells such that they are expressible by the cells or their progeny, and the recombinant cells are then administered in vivo for therapeutic effect. In a specific embodiment, stem or progenitor cells are used. Any stem and/or progenitor cells which can be isolated and maintained in vitro can potentially be used in accordance with this embodiment of the present invention (see e.g. PCT Publication WO 94/08598; Stemple and Anderson, Cell 71:973-985 (1992); Rheinwald, Meth. Cell Bio. 21A:229 (1980); and Pittelkow and Scott, Mayo Clinic Proc. 61:771 (1986)).

[0314] In a specific embodiment, the nucleic acid to be introduced for purposes of gene therapy comprises an inducible promoter operably linked to the coding region, such that expression of the nucleic acid is controllable by the presence or absence of an appropriate inducer of transcription.

[0315] Demonstration of Therapeutic or Prophylactic Activity

[0316] The compounds or pharmaceutical compositions of the invention are preferably tested in vitro, and then in vivo for the desired therapeutic or prophylactic activity, prior to use in humans. For example, in vitro assays to demonstrate the therapeutic or prophylactic utility of a compound or pharmaceutical composition include, the effect of a compound on a cell line or a patient tissue sample. The effect of the compound or composition on the cell line and/or tissue sample can be determined utilizing techniques known to those of skill in the art including, but not limited to, rosette formation assays and cell lysis assays. In accordance with the invention, in vitro assays which can be used to determine whether administration of a specific compound is indicated, include in vitro cell culture assays in which a patient tissue sample is grown in culture, and exposed to or otherwise administered a compound, and the effect of such compound upon the tissue sample is observed.

[0317] Therapeutic/Prophylactic Administration and Composition

[0318] The invention provides methods of treatment, inhibition and prophylaxis by administration to a subject of an effective amount of a compound or pharmaceutical composition of the invention, preferably a polypeptide or antibody of the invention. In a preferred embodiment, the compound is substantially purified (e.g., substantially free from substances that limit its effect or produce undesired side-effects). The subject is preferably an animal, including but not limited to animals such as cows, pigs, horses, chickens, cats, dogs, etc., and is preferably a mammal, and most preferably human.

[0319] Formulations and methods of administration that can be employed when the compound comprises a nucleic acid or an immunoglobulin are described above; additional appropriate formulations and routes of administration can be selected from among those described herein below.

[0320] Various delivery systems are known and can be used to administer a compound of the invention, e.g., encapsulation in liposomes, microparticles, microcapsules, recombinant cells capable of expressing the compound, receptor-mediated endocytosis (see, e.g., Wu and Wu, J. Biol. Chem. 262:4429-4432 (1987)), construction of a nucleic acid as part of a retroviral or other vector, etc. Methods of introduction include but are not limited to intradermal, intramuscular, intraperitoneal, intravenous, subcutaneous, intranasal, epidural, and oral routes. The compounds or compositions may be administered by any convenient route, for example by infusion or bolus injection, by absorption through epithelial or mucocutaneous linings (e.g., oral mucosa, rectal and intestinal mucosa, etc.) and may be administered together with other biologically active agents. Administration can be systemic or local. In addition, it may be desirable to introduce the pharmaceutical compounds or compositions of the invention into the central nervous system by any suitable route, including intraventricular and intrathecal injection; intraventricular injection may be facilitated by an intraventricular catheter, for example, attached to a reservoir, such as an Ommaya reservoir. Pulmonary administration can also be employed, e.g., by use of an inhaler or nebulizer, and formulation with an aerosolizing agent.

[0321] In a specific embodiment, it may be desirable to administer the pharmaceutical compounds or compositions of the invention locally to the area in need of treatment; this may be achieved by, for example, and not by way of limitation, local infusion during surgery, topical application, e.g., in conjunction with a wound dressing after surgery, by injection, by means of a catheter, by means of a suppository, or by means of an implant, said implant being of a porous, non-porous, or gelatinous material, including membranes, such as sialastic membranes, or fibers. Preferably, when administering a protein, including an antibody, of the invention, care must be taken to use materials to which the protein does not absorb.

[0322] In another embodiment, the compound or composition can be delivered in a vesicle, in particular a liposome (see Langer, Science 249:1527-1533 (1990); Treat et al., in Liposomes in the Therapy of Infectious Disease and Cancer, Lopez-Berestein and Fidler (eds.), Liss, New York, pp. 353-365 (1989); Lopez-Berestein, ibid., pp. 317-327; see generally ibid.)

[0323] In yet another embodiment, the compound or composition can be delivered in a controlled release system. In one embodiment, a pump may be used (see Langer, supra; Sefton, CRC Crit. Ref. Biomed. Eng. 14:201 (1987); Buchwald et al., Surgery 88:507 (1980); Saudek et al., N. Engl. J. Med. 321:574 (1989)). In another embodiment, polymeric materials can be used (see Medical Applications of Controlled Release, Langer and Wise (eds.), CRC Pres., Boca Raton, Fla. (1974); Controlled Drug Bioavailability, Drug Product Design and Performance, Smolen and Ball (eds.), Wiley, New York (1984); Ranger and Peppas, J., Macromol. Sci. Rev. Macromol. Chem. 23:61 (1983); see also Levy et al., Science 228:190 (1985); During et al., Ann. Neurol. 25:351 (1989); Howard et al., J.Neurosurg. 71:105 (1989)). In yet another embodiment, a controlled release system can be placed in proximity of the therapeutic target, e.g., the brain, thus requiring only a fraction of the systemic dose (see, e.g., Goodson, in Medical Applications of Controlled Release, supra, vol. 2, pp. 115-138 (1984)).

[0324] Other controlled release systems are discussed in the review by Langer (Science 249:1527-1533 (1990)).

[0325] In a specific embodiment where the compound of the invention is a nucleic acid encoding a protein, the nucleic acid can be administered in vivo to promote expression of its encoded protein, by constructing it as part of an appropriate nucleic acid expression vector and administering it so that it becomes intracellular, e.g., by use of a retroviral vector (see U.S. Pat. No. 4,980,286), or by direct injection, or by use of microparticle bombardment (e.g., a gene gun, Biolistic, Dupont), or coating with lipids or cell-surface receptors or transfecting agents, or by administering it in linkage to a homeobox-like peptide which is known to enter the nucleus (see e.g., Joliot et al., Proc. Natl. Acad. Sci. USA 88:1864-1868 (1991)), etc. Alternatively, a nucleic acid can be introduced intracellularly and incorporated within host cell DNA for expression, by homologous recombination.

[0326] The present invention also provides pharmaceutical compositions. Such compositions comprise a therapeutically effective amount of a compound, and a pharmaceutically acceptable carrier. In a specific embodiment, the term “pharmaceutically acceptable” means approved by a regulatory agency of the Federal or a state government or listed in the U.S. Pharmacopeia or other generally recognized pharmacopeia for use in animals, and more particularly in humans. The term “carrier” refers to a diluent, adjuvant, excipient, or vehicle with which the therapeutic is administered. Such pharmaceutical carriers can be sterile liquids, such as water and oils, including those of petroleum, animal, vegetable or synthetic origin, such as peanut oil, soybean oil, mineral oil, sesame oil and the like. Water is a preferred carrier when the pharmaceutical composition is administered intravenously. Saline solutions and aqueous dextrose and glycerol solutions can also be employed as liquid carriers, particularly for injectable solutions. Suitable pharmaceutical excipients include starch, glucose, lactose, sucrose, gelatin, malt, rice, flour, chalk, silica gel, sodium stearate, glycerol monostearate, talc, sodium chloride, dried skim milk, glycerol, propylene, glycol, water, ethanol and the like. The composition, if desired, can also contain minor amounts of wetting or emulsifying agents, or pH buffering agents. These compositions can take the form of solutions, suspensions, emulsion, tablets, pills, capsules, powders, sustained-release formulations and the like. The composition can be formulated as a suppository, with traditional binders and carriers such as triglycerides. Oral formulation can include standard carriers such as pharmaceutical grades of mannitol, lactose, starch, magnesium stearate, sodium saccharine, cellulose, magnesium carbonate, etc. Examples of suitable pharmaceutical carriers are described in “Remington's Pharmaceutical Sciences” by E. W. Martin. Such compositions will contain a therapeutically effective amount of the compound, preferably in purified form, together with a suitable amount of carrier so as to provide the form for proper administration to the patient. The formulation should suit the mode of administration.

[0327] In a preferred embodiment, the composition is formulated in accordance with routine procedures as a pharmaceutical composition adapted for intravenous administration to human beings. Typically, compositions for intravenous administration are solutions in sterile isotonic aqueous buffer. Where necessary, the composition may also include a solubilizing agent and a local anesthetic such as lignocaine to ease pain at the site of the injection. Generally, the ingredients are supplied either separately or mixed together in unit dosage form, for example, as a dry lyophilized powder or water free concentrate in a hermetically sealed container such as an ampoule or sachette indicating the quantity of active agent. Where the composition is to be administered by infusion, it can be dispensed with an infusion bottle containing sterile pharmaceutical grade water or saline. Where the composition is administered by injection, an ampoule of sterile water for injection or saline can be provided so that the ingredients may be mixed prior to administration.

[0328] The compounds of the invention can be formulated as neutral or salt forms. Pharmaceutically acceptable salts include those formed with anions such as those derived from hydrochloric, phosphoric, acetic, oxalic, tartaric acids, etc., and those formed with cations such as those derived from sodium, potassium, ammonium, calcium, ferric hydroxides, isopropylamine, triethylamine, 2-ethylamino ethanol, histidine, procaine, etc.

[0329] The amount of the compound of the invention which will be effective in the treatment, inhibition and prevention of a disease or disorder associated with aberrant expression and/or activity of a polypeptide of the invention can be determined by standard clinical techniques. In addition, in vitro assays may optionally be employed to help identify optimal dosage ranges. The precise dose to be employed in the formulation will also depend on the route of administration, and the seriousness of the disease or disorder, and should be decided according to the judgment of the practitioner and each patient's circumstances. Effective doses may be extrapolated from dose-response curves derived from in vitro or animal model test systems.

[0330] For antibodies, the dosage administered to a patient is typically 0.1 mg/kg to 100 mg/kg of the patient's body weight. Preferably, the dosage administered to a patient is between 0.1 mg/kg and 20 mg/kg of the patient's body weight, more preferably 1 mg/kg to 10 mg/kg of the patient's body weight. Generally, human antibodies have a longer half-life within the human body than antibodies from other species due to the immune response to the foreign polypeptides. Thus, lower dosages of human antibodies and less frequent administration is often possible. Further, the dosage and frequency of administration of antibodies of the invention may be reduced by enhancing uptake and tissue penetration (e.g., into the brain) of the antibodies by modifications such as, for example, lipidation.

[0331] The invention also provides a pharmaceutical pack or kit comprising one or more containers filled with one or more of the ingredients of the pharmaceutical compositions of the invention. Optionally associated with such container(s) can be a notice in the form prescribed by a governmental-agency regulating the manufacture, use or sale of pharmaceuticals or biological products, which notice reflects approval by the agency of manufacture, use or sale for human administration.

[0332] Diagnosis and Imaging

[0333] Labeled antibodies, and derivatives and analogs thereof, which specifically bind to a polypeptide of interest can be used for diagnostic purposes to detect, diagnose, or monitor diseases, disorders, and/or conditions associated with the aberrant expression and/or activity of a polypeptide of the invention. The invention provides for the detection of aberrant expression of a polypeptide of interest, comprising (a) assaying the expression of the polypeptide of interest in cells or body fluid of an individual using one or more antibodies specific to the polypeptide interest and (b) comparing the level of gene expression with a standard gene expression level, whereby an increase or decrease in the assayed polypeptide gene expression level compared to the standard expression level is indicative of aberrant expression.

[0334] The invention provides a diagnostic assay for diagnosing ovarian and/or breast cancer, comprising (a) assaying the expression of the polypeptide of interest in cells or body fluid of an individual using one or more antibodies specific to the polypeptide interest and (b) comparing the level of gene expression with a standard gene expression level, whereby an increase or decrease in the assayed polypeptide gene expression level compared to the standard expression level is indicative of a particular disorder. With respect to cancer, the presence of a relatively high amount of transcript in biopsied tissue from an individual may indicate a predisposition for the development of the disease, or may provide a means for detecting the disease prior to the appearance of actual clinical symptoms. A more definitive diagnosis of this type may allow health professionals to employ preventative measures or aggressive treatment earlier thereby preventing the development or further progression of the cancer.

[0335] Antibodies of the invention can be used to assay protein levels in a biological sample using classical immunohistological methods known to those of skill in the art (e.g., see Jalkanen et al., J. Cell. Biol. 101:976-985 (1985); Jalkanen et al., J. Cell . Biol. 105:3087-3096 (1987)). Other antibody-based methods useful for detecting protein gene expression include immunoassays, such as the enzyme linked immunosorbent assay (ELISA) and the radioimmunoassay (RIA). Suitable antibody assay labels are known in the art and include enzyme labels, such as, glucose oxidase; radioisotopes, such as iodine (125I, 121I), carbon (14C), sulfur (35S), tritium (3H), indium (112In), and technetium (99Tc); luminescent labels, such as luminol; and fluorescent labels, such as fluorescein and rhodamine, and biotin.

[0336] One facet of the invention is the detection and diagnosis of a disease or disorder associated with aberrant expression of a polypeptide of interest in an animal, preferably a mammal and most preferably a human. A preferred embodiment of the invention is the detection and diagnosis of ovarian and/or breast cancer associated with aberrant expression of a ovarian and/or breast cancer antigen in an animal, preferably a mammal and most preferably a human. In one embodiment, diagnosis comprises: a) administering (for example, parenterally, subcutaneously, or intraperitoneally) to a subject an effective amount of a labeled molecule which specifically binds to the polypeptide of interest; b) waiting for a time interval following the administering for permitting the labeled molecule to preferentially concentrate at sites in the subject where the polypeptide is expressed (and for unbound labeled molecule to be cleared to background level); c) determining background level; and d) detecting the labeled molecule in the subject, such that detection of labeled molecule above the background level indicates that the subject has a particular disease or disorder associated with aberrant expression of the polypeptide of interest. Background level can be determined by various methods including, comparing the amount of labeled molecule detected to a standard value previously determined for a particular system.

[0337] It will be understood in the art that the size of the subject and the imaging system used will determine the quantity of imaging moiety needed to produce diagnostic images. In the case of a radioisotope moiety, for a human subject, the quantity of radioactivity injected will normally range from about 5 to 20 millicuries of 99 mTc. The labeled antibody or antibody fragment will then preferentially accumulate at the location of cells which contain the specific protein. In vivo tumor imaging is described in S. W. Burchiel et al., “Immunopharmacokinetics of Radiolabeled Antibodies and Their Fragments.” (Chapter 13 in Tumor Imaging: The Radiochemical Detection of Cancer, S. W. Burchiel and B. A. Rhodes, eds., Masson Publishing Inc. (1982)).

[0338] Depending on several variables, including the type of label used and the mode of administration, the time interval following the administration for permitting the labeled molecule to preferentially concentrate at sites in the subject and for unbound labeled molecule to be cleared to background level is 6 to 48 hours or 6 to 24 hours or 6 to 12 hours. In another embodiment the time interval following administration is 5 to 20 days or 5 to 10 days.

[0339] In an embodiment, monitoring of the disease or disorder is carried out by repeating the method for diagnosing the disease or disorder, for example, one month after initial diagnosis, six months after initial diagnosis, one year after initial diagnosis, etc.

[0340] Presence of the labeled molecule can be detected in the patient using methods known in the art for in vivo scanning. These methods depend upon the type of label used. Skilled artisans will be able to determine the appropriate method for detecting a particular label. Methods and devices that may be used in the diagnostic methods of the invention include, but are not limited to, computed tomography (CT), whole body scan such as position emission tomography (PET), magnetic resonance imaging (MRI), and sonography.

[0341] In a specific embodiment, the molecule is labeled with a radioisotope and is detected in the patient using a radiation responsive surgical instrument (Thurston et al., U.S. Pat. No. 5,441,050). In another embodiment, the molecule is labeled with a fluorescent compound and is detected in the patient using a fluorescence responsive scanning instrument. In another embodiment, the molecule is labeled with a positron emitting metal and is detected in the patent using positron emission-tomography. In yet another embodiment, the molecule is labeled with a paramagnetic label and is detected in a patient using magnetic resonance imaging (MRI).

[0342] Kits

[0343] The present invention provides kits that can be used in the above methods. In one embodiment, a kit comprises an antibody of the invention, preferably a purified antibody, in one or more containers. In a specific embodiment, the kits of the present invention contain a substantially isolated polypeptide comprising an epitope, which is specifically immunoreactive with an antibody included in the kit. Preferably, the kits of the present invention further comprise a control antibody, which does not react with the polypeptide of interest. In another specific embodiment, the kits of the present invention contain a means for detecting the binding of an antibody to a polypeptide of interest (e.g., the antibody may be conjugated to a detectable substrate such as a fluorescent compound, an enzymatic substrate, a radioactive compound or a luminescent compound, or a second antibody which recognizes the first antibody may be conjugated to a detectable substrate).

[0344] In another specific embodiment of the present invention, the kit is a diagnostic kit for use in screening serum containing antibodies specific against proliferative and/or cancerous polynucleotides and polypeptides. Such a kit may include a control antibody that does not react with the polypeptide of interest. Such a kit may include a substantially isolated polypeptide antigen comprising an epitope, which is specifically immunoreactive with at least one anti-polypeptide antigen antibody. Further, such a kit includes means for detecting the binding of said antibody to the antigen (e.g., the antibody may be conjugated to a fluorescent compound such as fluorescein or rhodamine, which can be detected by flow cytometry). In specific embodiments, the kit may include a recombinantly produced or chemically synthesized polypeptide antigen. The polypeptide antigen of the kit may also be attached to a solid support.

[0345] In a more specific embodiment the detecting means of the above-described kit includes a solid support to which said polypeptide antigen is attached. Such a kit may also include a non-attached reporter-labeled anti-human antibody. In this embodiment, binding of the antibody to the polypeptide antigen can be detected by binding of the said reporter-labeled antibody.

[0346] In an additional embodiment, the invention includes a diagnostic kit for use in screening serum containing antigens of the polypeptide of the invention. The diagnostic kit includes a substantially isolated antibody specifically immunoreactive with polypeptide or polynucleotide antigens, and means for detecting the binding of the polynucleotide or polypeptide antigen to the antibody. In one embodiment, the antibody is attached to a solid support. In a specific embodiment, the antibody may be a monoclonal antibody. The detecting means of the kit may include a second, labeled monoclonal antibody. Alternatively, or in addition, the detecting means may include a labeled, competing antigen.

[0347] In one diagnostic configuration, test serum is reacted with a solid phase reagent having a surface-bound antigen obtained by the methods of the present invention. After binding with specific antigen antibody to the reagent and removing unbound serum components by washing, the reagent is reacted with reporter-labeled anti-human antibody to bind reporter to the reagent in proportion to the amount of bound anti-antigen antibody on the solid support. The reagent is again washed to remove unbound labeled antibody, and the amount of reporter associated with the reagent is determined. Typically, the reporter is an enzyme, which is detected by incubating the solid phase in the presence of a suitable fluorometric, luminescent or colorimetric substrate (Sigma, St. Louis, Mo.).

[0348] The solid surface reagent in the above assay is prepared by known techniques for attaching protein material to solid support material, such as polymeric beads, dip sticks, 96-well plate or filter material. These attachment methods generally include non-specific adsorption of the protein to the support or covalent attachment of the protein, typically through a free amine group, to a chemically reactive group on the solid support, such as an activated carboxyl, hydroxyl, or aldehyde group. Alternatively, streptavidin coated plates can be used in conjunction with biotinylated antigen(s).

[0349] Thus, the invention provides an assay system or kit for carrying out this diagnostic method. The kit generally includes a support with surface-bound recombinant antigens, and a reporter-labeled anti-human antibody for detecting surface-bound anti-antigen antibody.

[0350] Uses of the Polynucleotides

[0351] Each of the polynucleotides identified herein can be used in numerous ways as reagents. The following description should be considered exemplary and utilizes known techniques.

[0352] The polynucleotides of the present invention are useful for chromosome identification. There exists an ongoing need to identify new chromosome markers, since few chromosome marking reagents, based on actual sequence data (repeat polymorphisms), are presently available. Each sequence is specifically targeted to and can hybridize with a particular location on an individual human chromosome, thus each polynucleotide of the present invention can routinely be used as a chromosome marker using techniques known in the art. Table 1A, column 8 provides the chromosome location of some of the polynucleotides of the invention.

[0353] Briefly, sequences can be mapped to chromosomes by preparing PCR primers (preferably at least 15 bp (e.g., 15-25 bp) from the sequences shown in SEQ ID NO:X. Primers can optionally be selected using computer analysis so that primers do not span more than one predicted exon in the genomic DNA. These primers are then used for PCR screening of somatic cell hybrids containing individual human chromosomes. Only those hybrids containing the human gene corresponding to SEQ ID NO:X will yield an amplified fragment.

[0354] Similarly, somatic hybrids provide a rapid method of PCR mapping the polynucleotides to particular chromosomes. Three or more clones can be assigned per day using a single thermal cycler. Moreover, sublocalization of the polynucleotides can be achieved with panels of specific chromosome fragments. Other gene mapping strategies that can be used include in situ hybridization, prescreening with labeled flow-sorted chromosomes, preselection by hybridization to construct chromosome specific-cDNA libraries, and computer mapping techniques (See, e.g., Shuler, Trends Biotechnol 16:456-459 (1998) which is hereby incorporated by reference in its entirety).

[0355] Precise chromosomal location of the polynucleotides can also be achieved using fluorescence in situ hybridization (FISH) of a metaphase chromosomal spread. This technique uses polynucleotides as short as 500 or 600 bases; however, polynucleotides 2,000-4,000 bp are preferred. For a review of this technique, see Verma et al., “Human Chromosomes: a Manual of Basic Techniques,” Pergamon Press, New York (1988).

[0356] For chromosome mapping, the polynucleotides can be used individually (to mark a single chromosome or a single site on that chromosome) or in panels (for marking multiple sites and/or multiple chromosomes).

[0357] Thus, the present invention also provides a method for chromosomal localization which involves (a) preparing PCR primers from the polynucleotide sequences in Table 1A and/or Table 2 and SEQ ID NO:X and (b) screening somatic cell hybrids containing individual chromosomes.

[0358] The polynucleotides of the present invention would likewise be useful for radiation hybrid mapping, HAPPY mapping, and long range restriction mapping. For a review of these techniques and others known in the art, see, e.g. Dear, “Genome Mapping: A Practical Approach,” IRL Press at Oxford University Press, London (1997); Aydin, J. Mol. Med. 77:691-694 (1999); Hacia et al., Mol. Psychiatry 3:483-492 (1998); Herrick et al., Chromosome Res. 7:409-423 (1999); Hamilton et al., Methods Cell Biol. 62:265-280 (2000); and/or Ott, J. Hered. 90:68-70 (1999), each of which is hereby incorporated by reference in its entirety.

[0359] Once a polynucleotide has been mapped to a precise chromosomal location, the physical position of the polynucleotide can be used in linkage analysis. Linkage analysis establishes coinheritance between a chromosomal location and presentation of a particular disease. (Disease mapping data are found, for example, in V. McKusick, Mendelian Inheritance in Man (available on line through Johns Hopkins University Welch Medical Library).) Column 9 of Table 1A provides an OMIM reference identification number of diseases associated with the cytologic band disclosed in column 8 of Table 1A, as determined using techniques described herein and by reference to Table 5. Assuming 1 megabase mapping resolution and one gene per 20 kb, a cDNA precisely localized to a chromosomal region associated with the disease could be one of 50-500 potential causative genes.

[0360] Thus, once coinheritance is established, differences in a polynucleotide of the invention and the corresponding gene between affected and unaffected individuals can be examined. First, visible structural alterations in the chromosomes, such as deletions or translocations, are examined in chromosome spreads or by PCR. If no structural alterations exist, the presence of point mutations are ascertained. Mutations observed in some or all affected individuals, but not in normal individuals, indicate that the mutation may cause the disease. However, complete sequencing of the polypeptide and the corresponding gene from several normal individuals is required to distinguish the mutation from a polymorphism. If a new polymorphism is identified, this polymorphic polypeptide can be used for further linkage analysis.

[0361] Furthermore, increased or decreased expression of the gene in affected individuals as compared to unaffected individuals can be assessed using the polynucleotides of the invention. Any of these alterations (altered expression, chromosomal rearrangement, or mutation) can be used as a diagnostic or prognostic marker. Diagnostic and prognostic methods, kits and reagents encompassed by the present invention are briefly described below and more thoroughly elsewhere herein (see e.g., the sections labeled “Antibodies”, “Diagnostic Assays”, and “Methods for Detecting Ovarian and/or Breast Cancer”).

[0362] Thus, the invention also provides a diagnostic method useful during diagnosis of a disorder, involving measuring the expression level of polynucleotides of the present invention in cells or body fluid from an individual and comparing the measured gene expression level with a standard level of polynucleotide expression level, whereby an increase or decrease in the gene expression level compared to the standard is indicative of a disorder. Additional non-limiting examples of diagnostic methods encompassed by the present invention are more thoroughly described elsewhere herein (see, e.g., Example 12).

[0363] In still another embodiment, the invention includes a kit for analyzing samples for the presence of proliferative and/or cancerous polynucleotides derived from a test subject, as further described herein. In a general embodiment, the kit includes at least one polynucleotide probe containing a nucleotide sequence that will specifically hybridize with a polynucleotide of the invention and a suitable container. In a specific embodiment, the kit includes two polynucleotide probes defining an internal region of the polynucleotide of the invention, where each probe has one strand containing a 31′mer-end internal to the region. In a further embodiment, the probes may be useful as primers for polymerase chain reaction amplification.

[0364] Where a diagnosis of a related disorder, including, for example, diagnosis of a tumor, has already been made according to conventional methods, the present invention is useful as a prognostic indicator, whereby patients exhibiting enhanced or depressed polynucleotide of the invention expression will experience a worse clinical outcome relative to patients expressing the gene at a level nearer the standard level.

[0365] By “measuring the expression level of polynucleotides of the invention” is intended qualitatively or quantitatively measuring or estimating the level of the polypeptide of the invention or the level of the mRNA encoding the polypeptide of the invention in a first biological sample either directly (e.g., by determining or estimating absolute protein level or mRNA level) or relatively (e.g., by comparing to the polypeptide level or mRNA level in a second biological sample). Preferably, the polypeptide level or mRNA level in the first biological sample is measured or estimated and compared to a standard polypeptide level or mRNA level, the standard being taken from a second biological sample obtained from an individual not having the related disorder or being determined by averaging levels from a population of individuals not having a related disorder. As will be appreciated in the art, once a standard polypeptide level or mRNA level is known, it can be used repeatedly as a standard for comparison.

[0366] By “biological sample” is intended any biological sample obtained from an individual, body fluid, cell line, tissue culture, or other source which contains polypeptide of the present invention or the corresponding mRNA. As indicated, biological samples include body fluids (such as semen, lymph, vaginal pool, sera, plasma, urine, synovial fluid and spinal fluid) which contain the polypeptide of the present invention, and tissue sources found to express the polypeptide of the present invention. Methods for obtaining tissue biopsies and body fluids from mammals are well known in the art. Where the biological sample is to include mRNA, a tissue biopsy is the preferred source.

[0367] The method(s) provided above may preferably be applied in a diagnostic method and/or kits in which polynucleotides and/or polypeptides of the invention are attached to a solid support. In one exemplary method, the support may be a “gene chip” or a “biological chip” as described in U.S. Pat. Nos. 5,837,832, 5,874,219, and 5,856,174. Further, such a gene chip with polynucleotides of the invention attached may be used to identify polymorphisms between the isolated polynucleotide sequences of the invention, with polynucleotides isolated from a test subject. The knowledge of such polymorphisms (i.e., their location, as well as, their existence) would be beneficial in identifying disease loci for many disorders, such as for example, in neural disorders, immune system disorders, muscular disorders, reproductive disorders, gastrointestinal disorders, pulmonary disorders, digestive disorders, cardiovascular disorders, renal disorders, proliferative disorders, and/or cancerous diseases and conditions. Such a method is described in U.S. Pat. Nos. 5,858,659 and 5,856,104. The U.S. Patents referenced supra are hereby incorporated by reference in their entirety herein.

[0368] The present invention encompasses polynucleotides of the present invention that are chemically synthesized, or reproduced as peptide nucleic acids (PNA), or according to other methods known in the art. The use of PNAs would serve as the preferred form if the polynucleotides of the invention are incorporated onto a solid support, or gene chip. For the purposes of the present invention, a peptide nucleic acid (PNA) is a polyamide type of DNA analog and the monomeric units for adenine, guanine, thymine and cytosine are available commercially (Perceptive Biosystems). Certain components of DNA, such as phosphorus, phosphorus oxides, or deoxyribose derivatives, are not present in PNAs. As disclosed by Nielsen et al., Science 254:1497 (1991); and Egholm et al., Nature 365:666 (1993), PNAs bind specifically and tightly to complementary DNA strands and are not degraded by nucleases. In fact, PNA binds more strongly to DNA than DNA itself does. This is probably because there is no electrostatic repulsion between the two strands, and also the polyamide backbone is more flexible. Because of this, PNA/DNA duplexes bind under a wider range of stringency conditions than DNA/DNA duplexes, making it easier to perform multiplex hybridization. Smaller probes can be used than with DNA due to the strong binding. In addition, it is more likely that single base mismatches can be determined with PNA/DNA hybridization because a single mismatch in a PNA/DNA 15-mer lowers the melting point (T.sub.m) by 8°-20° C., vs. 4°-16° C. for the DNA/DNA 15-mer duplex. Also, the absence of charge groups in PNA means that hybridization can be done at low ionic strengths and reduce possible interference by salt during the analysis.

[0369] The compounds of the present invention have uses, which include, but are not limited to, detecting cancer in mammals. In particular the invention is useful during diagnosis of pathological cell proliferative neoplasias which include, but are not limited to: acute myelogenous leukemias including acute monocytic leukemia, acute myeloblastic leukemia, acute promyelocytic leukemia, acute myelomonocytic leukemia, acute erythroleukemia, acute megakaryocytic leukemia, and acute undifferentiated leukemia, etc.; and chronic myelogenous leukemias including chronic myelomonocytic leukemia, chronic granulocytic leukemia, etc. Preferred mammals include monkeys, apes, cats, dogs, cows, pigs, horses, rabbits and humans. Particularly preferred are humans.

[0370] The compounds of the present invention have preferred uses which include, but are not limited to, detecting ovarian and/or breast cancer in mammals. In particular the invention is useful during diagnosis of pathological cell proliferative neoplasias which include, but are not limited to: ovarian and/or breast cancer, including, but not limited to, cancers of the ovaries, such as primary and secondary cancerous growth, endometrioid carcinoma of the ovary, ovarian papillary serous adenocarcinoma, ovarian mucinous adenocarcinoma, and ovarian Krukenberg tumors; and cancers of the breast, such as in situ carcinomas (e.g., ductal carcinoma in situ, Paget's disease, and lobular carcinoma in situ), invasive carcinomas (e.g., invasive ductal carcinoma, invasive lobular carcinoma, medullary carcinoma, colloid (mucinous) carcinoma, tubular carcinoma, and invasive papillary carcinoma), and fibroadenoma, pipillary carcinoma, secretory carcinoma, and apocrine carcinoma; and/or as described under “Hyperproliferative Disorders” and “Reproductive System Disorders” below. Preferred mammals include monkeys, apes, cats, dogs, cows, pigs, horses, rabbits and humans. Particularly preferred are humans.

[0371] Pathological cell proliferative disorders are often associated with inappropriate activation of proto-oncogenes. (Gelmann, E. P. et al., “The Etiology of Acute Leukemia: Molecular Genetics and Viral Oncology,” in Neoplastic Diseases of the Blood, Vol 1., Wiernik, P. H. et al. eds., 161-182 (1985)). Neoplasias are now believed to result from the qualitative alteration of a normal cellular gene product, or from the quantitative modification of gene expression by insertion into the chromosome of a viral sequence, by chromosomal translocation of a gene to a more actively transcribed region, or by some other mechanism. (Gelmann et al., supra) It is likely that mutated or altered expression of specific genes is involved in the pathogenesis of some leukemias, among other tissues and cell types. (Gelmann et al., supra) Indeed, the human counterparts of the oncogenes involved in some animal neoplasias have been amplified or translocated in some cases of human leukemia and carcinoma. (Gelmann et al., supra)

[0372] For example, c-myc expression is highly amplified in the non-lymphocytic leukemia cell line HL-60. When HL-60 cells are chemically induced to stop proliferation, the level of c-myc is found to be downregulated. (International Publication Number WO 91/15580). However, it has been shown that exposure of HL-60 cells to a DNA construct that is complementary to the 5′ end of c-myc or c-myb blocks translation of the corresponding mRNAs which downregulates expression of the c-myc or c-myb proteins and causes arrest of cell proliferation and differentiation of the treated cells. (International Publication Number WO 91/15580; Wickstrom et al., Proc. Natl. Acad. Sci. 85:1028 (1988); Anfossi et al., Proc. Natl. Acad. Sci. 86:3379 (1989)). However, the skilled artisan would appreciate the present invention's usefulness is not be limited to treatment, prevention, diagnosis and/or prognosis, of proliferative disorders of cells and tissues of hematopoietic origin, in light of the numerous cells and cell types of varying origins which are known to exhibit proliferative phenotypes. In preferred embodiments, the compounds and/or methods of the invention are used to treat, prevent, diagnose, and/or prognose, proliferative disorders of ovarian and/or breast cells and tissues.

[0373] In addition to the foregoing, a polynucleotide of the present invention can be used to control gene expression through triple helix formation or through antisense DNA or RNA. Antisense techniques are discussed, for example, in Okano, J. Neurochem. 56: 560 (1991); “Oligodeoxynucleotides as Antisense Inhibitors of Gene Expression, CRC Press, Boca Raton, Fla. (1988). Triple helix formation is discussed in, for instance Lee et al., Nucleic Acids Research 6: 3073 (1979); Cooney et al., Science 241: 456 (1988); and Dervan et al., Science 251: 1360 (1991). Both methods rely on binding of the polynucleotide to a complementary DNA or RNA. For these techniques, preferred polynucleotides are usually oligonucleotides 20 to 40 bases in length and complementary to either the region of the gene involved in transcription (triple helix—see Lee et al., Nucl. Acids Res. 6:3073 (1979); Cooney et al., Science 241:456 (1988); and Dervan et al., Science 251:1360 (1991)) or to the mRNA itself (antisense—Okano, J. Neurochem. 56:560 (1991); Oligodeoxy-nucleotides as Antisense Inhibitors of Gene Expression, CRC Press, Boca Raton, Fla. (1988).) Triple helix formation optimally results in a shut-off of RNA transcription from DNA, while antisense RNA hybridization blocks translation of an mRNA molecule into polypeptide. The oligonucleotide described above can also be delivered to cells such that the antisense RNA or DNA may be expressed in vivo to inhibit production of polypeptide of the present invention antigens. Both techniques are effective in model systems, and the information disclosed herein can be used to design antisense or triple helix polynucleotides in an effort to treat disease, and in particular, for the treatment of proliferative diseases and/or conditions. Non-limiting antisense and triple helix methods encompassed by the present invention are more thoroughly described elsewhere herein (see, e.g., the section labeled “Antisense and Ribozyme (Antagonists)”).

[0374] Polynucleotides of the present invention are also useful in gene therapy. One goal of gene therapy is to insert a normal gene into an organism having a defective gene, in an effort to correct the genetic defect. The polynucleotides disclosed in the present invention offer a means of targeting such genetic defects in a highly accurate manner. Another goal is to insert a new gene that was not present in the host genome, thereby producing a new trait in the host cell. Additional non-limiting examples of gene therapy methods encompassed by the present invention are more thoroughly described elsewhere herein (see, e.g., the sections labeled “Gene Therapy Methods” and Examples 16, 17 and 18).

[0375] The polynucleotides are also useful for identifying individuals from minute biological samples. The United States military, for example, is considering the use of restriction fragment length polymorphism (RFLP) for identification of its personnel. In this technique, an individual's genomic DNA is digested with one or more restriction enzymes, and probed on a Southern blot to yield unique bands for identifying personnel. This method does not suffer from the current limitations of “Dog Tags” which can be lost, switched, or stolen, making positive identification difficult. The polynucleotides of the present invention can be used as additional DNA markers for RFLP.

[0376] The polynucleotides of the present invention can also be used as an alternative to RFLP, by determining the actual base-by-base DNA sequence of selected portions of an individual's genome. These sequences can be used to prepare PCR primers for amplifying and isolating such selected DNA, which can then be sequenced. Using this technique, individuals can be identified because each individual will have a unique set of DNA sequences. Once an unique ID database is established for an individual, positive identification of that individual, living or dead, can be made from extremely small tissue samples.

[0377] Forensic biology also benefits from using DNA-based identification techniques as disclosed herein. DNA sequences taken from very small biological samples such as tissues, e.g., hair or skin, or body fluids, e.g., blood, saliva, semen, synovial fluid, amniotic fluid, breast milk, lymph, pulmonary sputum or surfactant, urine, fecal matter, etc., can be amplified using PCR. In one prior art technique, gene sequences amplified from polymorphic loci, such as DQa class II HLA gene, are used in forensic biology to identify individuals. (Erlich, H., PCR Technology, Freeman and Co. (1992).) Once these specific polymorphic loci are amplified, they are digested with one or more restriction enzymes, yielding an identifying set of bands on a Southern blot probed with DNA corresponding to the DQa class II HLA gene. Similarly, polynucleotides of the present invention can be used as polymorphic markers for forensic purposes.

[0378] There is also a need for reagents capable of identifying the source of a particular tissue. Such need arises, for example, in forensics when presented with tissue of unknown origin. Appropriate reagents can comprise, for example, DNA probes or primers prepared from the sequences of the present invention, specific to tissues, including but not limited to, those sequences referred to in Table 1A. Panels of such reagents can identify tissue by species and/or by organ type. In a similar fashion, these reagents can be used to screen tissue cultures for contamination. Additional non-limiting examples of such uses are further described herein.

[0379] Because ovarian and/or breast cancer antigens are found expressed in the ovaries and/or breast, the polynucleotides of the present invention are also useful as hybridization probes for differential identification of the tissue(s) or cell type(s) present in a biological sample. Similarly, polypeptides and antibodies directed to polypeptides of the present invention are useful to provide immunological probes for differential identification of the tissue(s) (e.g., immunohistochemistry assays) or cell type(s) (e.g., immunocytochemistry assays). In a specific embodiment, the polynucleotides of the present invention are also useful as hybridization probes for differential identification of ovarian and/or breast cancer tissue(s) or cell type(s) present in a biological sample. Similarly, polypeptides and antibodies directed to polypeptides of the present invention are useful to provide immunological probes for differential identification of ovarian and/or breast cancer tissue(s) (e.g., immunohistochemistry assays) or cell type(s) (e.g., immunocytochemistry assays). In addition, for a number of disorders of the above tissues or cells, significantly higher or lower levels of gene expression of the polynucleotides/polypeptides of the present invention may be detected in certain tissues (e.g., tissues expressing polypeptides and/or polynucleotides of the present invention, for example, normal ovarian and/or breast or diseased ovarian and/or breast cancer tissues, and/or those tissues/cells corresponding to the library source relating to a polynucleotide sequence of the invention as disclosed in column 7 of Table 1A, and/or cancerous and/or wounded tissues) or bodily fluids (e.g., semen, lymph, vaginal pool, serum, plasma, urine, synovial fluid or spinal fluid) taken from an individual having such a disorder, relative to a “standard” gene expression level, i.e., the expression level in healthy tissue from an individual not having the disorder.

[0380] Thus, the invention provides a diagnostic method of a disorder, which involves: (a) assaying gene expression level in cells or body fluid of an individual; (b) comparing the gene expression level with a standard gene expression level, whereby an increase or decrease in the assayed gene expression level compared to the standard expression level is indicative of a disorder.

[0381] In the very least, the polynucleotides of the present invention can be used as molecular weight markers on Southern gels, as diagnostic probes for the presence of a specific mRNA in a particular cell type, as a probe to “subtract-out” known sequences in the process of discovering novel polynucleotides, for selecting and making oligomers for attachment to a “gene chip” or other support, to raise anti-DNA antibodies using DNA immunization techniques, and as an antigen to elicit an immune response.

[0382] Uses of the Polypeptides

[0383] Each of the polypeptides identified herein can be used in numerous ways. The following description should be considered exemplary and utilizes known techniques.

[0384] Polypeptides and antibodies directed to polypeptides of the present invention are useful to provide immunological probes for differential identification of the tissue(s) (e.g., immunohistochemistry assays such as, for example, ABC immunoperoxidase (Hsu et al., J. Histochem. Cytochem. 29:577-580 (1981)) or cell type(s) (e.g., immunocytochemistry assays).

[0385] Antibodies can be used to assay levels of polypeptides encoded by polynucleotides of the invention in a biological sample using classical immunohistological methods known to those of skill in the art (see, e.g., Jalkanen, et al., J. Cell. Biol. 101:976-985 (1985); Jalkanen, et al., J. Cell. Biol. 105:3087-3096 (1987)). Other antibody-based methods useful for detecting protein gene expression include immunoassays, such as the enzyme linked immunosorbent assay (ELISA) and the radioimmunoassay (RIA). Suitable antibody assay labels are known in the art and include enzyme labels, such as, glucose oxidase; radioisotopes, such as iodine (¹³¹I, ¹²⁵I, ¹²³I, ¹²¹I), carbon (¹⁴C), sulfur (³⁵S), tritium (³H), indium (^{115m}In, ^{113m}In, ¹¹²In, ¹¹¹In), and technetium (⁹⁹Tc, ^{99m}Tc), thallium (²⁰¹Ti), gallium (⁶⁸Ga, ⁶⁷Ga), palladium (¹⁰³Pd), molybdenum (⁹⁹Mo), xenon (¹³³Xe), fluorine (¹⁸F), ¹⁵³Sm, ¹⁷⁷Lu, ¹⁵⁹Gd, ¹⁴⁹Pm, ¹⁴⁰La, ¹⁷⁵Yb, ¹⁶⁶Ho, ⁹⁰Y, ⁴⁷Sc, ¹⁸⁶Re, ¹⁸⁸Re, ¹⁴²Pr, ¹⁰⁵Rh, ⁹⁷Ru; luminescent labels, such as luminol; and fluorescent labels, such as fluorescein and rhodamine, and biotin.

[0386] In addition to assaying levels of polypeptide of the present invention in a biological sample, proteins can also be detected in vivo by imaging. Antibody labels or markers for in vivo imaging of protein include those detectable by X-radiography, NMR or ESR. For X-radiography, suitable labels include radioisotopes such as barium or cesium, which emit detectable radiation but are not overtly harmful to the subject. Suitable markers for NMR and ESR include those with a detectable characteristic spin, such as deuterium, which may be incorporated into the antibody by labeling of nutrients for the relevant hybridoma.

[0387] An ovarian and/or breast cancer antigen-specific antibody or antibody fragment which has been labeled with an appropriate detectable imaging moiety, such as a radioisotope (for example, ¹³¹I, ¹¹²In, ^{99m}Tc, (¹³¹I, ¹²⁵I, ¹²³I, ¹²¹I), carbon (¹⁴C), sulfur (³⁵S), tritium (³H), indium (^{115m}In, ^{113m}In, ¹¹²In, ¹¹¹In), and technetium (⁹⁹Tc, ^{99m}Tc), thallium (²⁰¹Ti), gallium (⁶⁸ Ga, ⁶⁷Ga), palladium (¹⁰³Pd), molybdenum (⁹⁹Mo), xenon (¹³³Xe), fluorine (¹⁸F, ¹⁵³Sm, ¹⁷⁷Lu, ¹⁵⁹Gd, ⁴⁹Pm, ¹⁴⁰La, ¹⁷⁵Yb, ¹⁶⁶Ho, ⁹⁰Y, ⁴⁷Sc, ¹⁸⁶Re, ¹⁸⁸Re, ¹⁴²Pr, ¹⁰⁵Rh, ⁹⁷Ru), a radio-opaque substance, or a material detectable by nuclear magnetic resonance, is introduced (for example, parenterally, subcutaneously or intraperitoneally) into the mammal to be examined for ovarian and/or breast cancer. It will be understood in the art that the size of the subject and the imaging system used will determine the quantity of imaging moiety needed to produce diagnostic images. In the case of a radioisotope moiety, for a human subject, the quantity of radioactivity injected will normally range from about 5 to 20 millicuries of ^{99m}Tc. The labeled antibody or antibody fragment will then preferentially accumulate at the location of cells which express the polypeptide encoded by a polynucleotide of the invention. In vivo tumor imaging is described in S. W. Burchiel et al., “Immunopharmacokinetics of Radiolabeled Antibodies and Their Fragments” (Chapter 13 in Tumor Imaging: The Radiochemical Detection of Cancer, S. W. Burchiel and B. A. Rhodes, eds., Masson Publishing Inc. (1982)).

[0388] In one embodiment, the invention provides a method for the specific delivery of compositions of the invention to cells by administering polypeptides of the invention (e.g., polypeptides encoded by polynucleotides of the invention and/or antibodies) that are associated with heterologous polypeptides or nucleic acids. In one example, the invention provides a method for delivering a therapeutic protein into the targeted cell. In another example, the invention provides a method for delivering a single stranded nucleic acid (e.g., antisense or ribozymes) or double stranded nucleic acid (e.g., DNA that can integrate into the cell's genome or replicate episomally and that can be transcribed) into the targeted cell.

[0389] In another embodiment, the invention provides a method for the specific destruction of cells (e.g., the destruction of tumor cells) by administering polypeptides of the invention in association with toxins or cytotoxic prodrugs.

[0390] In a preferred embodiment, the invention provides a method for the specific destruction of ovarian and/or breast cancer cells by administering polypeptides of the invention (e.g., polypeptides encoded by polynucleotides of the invention and/or antibodies) in association with toxins or cytotoxic prodrugs. In another preferred embodiment the invention provides a method for the specific destruction of tissues/cells corresponding to the library source relating to a polynucleotide sequence of the invention as disclosed in column 7 of Table 1A by administering polypeptides of the invention in association with toxins or cytotoxic prodrugs.

[0391] By “toxin” is meant one or more compounds that bind and activate endogenous cytotoxic effector systems, radioisotopes, holotoxins, modified toxins, catalytic subunits of toxins, or any molecules or enzymes not normally present in or on the surface of a cell that under defined conditions cause the cell's death. Toxins that may be used according to the methods of the invention include, but are not limited to, radioisotopes known in the art, compounds such as, for example, antibodies (or complement fixing containing portions thereof) that bind an inherent or induced endogenous cytotoxic effector system, thymidine kinase, endonuclease, RNAse, alpha toxin, ricin, abrin, Pseudomonas exotoxin A, diphtheria toxin, saporin, momordin, gelonin, pokeweed antiviral protein, alpha-sarcin and cholera toxin. “Toxin” also includes a cytostatic or cytocidal agent, a therapeutic agent or a radioactive metal ion, e.g., alpha-emitters such as, for example, ²¹³Bi, or other radioisotopes such as, for example, ¹⁰³Pd, ¹³³Xe, ¹³¹I, ¹¹¹In, ⁶⁸Ge, ⁵⁷Co, ⁶⁵Zn, ⁸⁵Sr, ³²P, ³⁵S, ⁹⁰Y, ¹⁵³Sm, ¹⁵³Gd, ¹⁶⁹Yb, ⁵¹Cr, ⁵⁴Mn, ⁷⁵Se, ¹¹³Sn, ⁹⁰Yttrium, ¹¹⁷Tin, ¹⁸⁶Rhenium, ¹⁶⁶Holmium, and ¹⁸⁸Rhenium; luminescent labels, such as luminol; and fluorescent labels, such as fluorescein and rhodamine, and biotin.

[0392] In a specific embodiment, the invention provides a method for the specific destruction of cells (e.g., the destruction of tumor cells) by administering polypeptides of the invention or antibodies of the invention in association with the radioisotope ⁹⁰Y. In another specific embodiment, the invention provides a method for the specific destruction of cells (e.g., the destruction of tumor cells) by administering polypeptides of the invention or antibodies of the invention in association with the radioisotope ¹¹¹In. In a further specific embodiment, the invention provides a method for the specific destruction of cells (e.g., the destruction of tumor cells) by administering polypeptides of the invention or antibodies of the invention in association with the radioisotope ¹³¹I.

[0393] Techniques known in the art may be applied to label polypeptides of the invention (including antibodies). Such techniques include, but are not limited to, the use of bifunctional conjugating agents (see e.g., U.S. Pat. Nos. 5,756,065; 5,714,631; 5,696,239; 5,652,361; 5,505,931; 5,489,425; 5,435,990; 5,428,139; 5,342,604; 5,274,119; 4,994,560; and 5,808,003; the contents of each of which are hereby incorporated by reference in its entirety).

[0394] Thus, the invention provides a diagnostic method of a disorder, which involves (a) assaying the expression level of a polypeptide of the present invention in cells or body fluid of an individual; and (b) comparing the assayed polypeptide expression level with a standard polypeptide expression level, whereby an increase or decrease in the assayed polypeptide expression level compared to the standard expression level is indicative of a disorder. With respect to cancer, the presence of a relatively high amount of transcript in biopsied tissue from an individual may indicate a predisposition for the development of the disease, or may provide a means for detecting the disease prior to the appearance of actual clinical symptoms. A more definitive diagnosis of this type may allow health professionals to employ preventative measures or aggressive treatment earlier thereby preventing the development or further progression of the cancer.

[0395] Moreover, polypeptides of the present invention can be used to treat or prevent diseases or conditions associated with ovarian and/or breast cancer such as, for example, cancers of the ovaries, such as primary and secondary cancerous growth, endometrioid carcinoma of the ovary, ovarian papillary serous adenocarcinoma, ovarian mucinous adenocarcinoma, and ovarian Krukenberg tumors; and cancers of the breast, such as in situ carcinomas (e.g., ductal carcinoma in situ, Paget's disease, and lobular carcinoma in situ), invasive carcinomas (e.g., invasive ductal carcinoma, invasive lobular carcinoma, medullary carcinoma, colloid (mucinous) carcinoma, tubular carcinoma, and invasive papillary carcinoma), and fibroadenoma, pipillary carcinoma, secretory carcinoma, and apocrine carcinoma; and/or as described under “Hyperproliferative Disorders” and “Reproductive System Disorders” below. In preferred embodiments, polynucleotides expressed in a particular tissue type (see, e.g., Table 1A, column 7) are used to diagnose, detect, prevent, treat and/or prognose disorders associated with the tissue type. For example, patients can be administered a polypeptide of the present invention in an effort to replace absent or decreased levels of the polypeptide (e.g., insulin), to supplement absent or decreased levels of a different polypeptide (e.g., hemoglobin S for hemoglobin B, SOD, catalase, DNA repair proteins), to inhibit the activity of a polypeptide (e.g., an oncogene or tumor supressor), to activate the activity of a polypeptide (e.g., by binding to a receptor), to reduce the activity of a membrane bound receptor by competing with it for free ligand (e.g., soluble TNF receptors used in reducing inflammation), or to bring about a desired response (e.g., blood vessel growth inhibition, enhancement of the immune response to proliferative cells or tissues).

[0396] Similarly, antibodies directed to a polypeptide of the present invention can also be used to treat disease (as described supra, and elsewhere herein). For example, administration of an antibody directed to a polypeptide of the present invention can bind, and/or neutralize the polypeptide, and/or reduce overproduction of the polypeptide. Similarly, administration of an antibody can activate the polypeptide, such as by binding to a polypeptide bound to a membrane (receptor).

[0397] At the very least, the polypeptides of the present invention can be used as molecular weight markers on SDS-PAGE gels or on molecular sieve gel filtration columns using methods well known to those of skill in the art. Polypeptides can also be used to raise antibodies, which in turn are used to measure protein expression from a recombinant cell, as a way of assessing transformation of the host cell. Moreover, the polypeptides of the present invention can be used to test the biological activities described herein.

[0398] Diagnostic Asssays

[0399] The compounds of the present invention are useful for diagnosis, treatment, prevention and/or prognosis of various ovarian and/or breast cancer related disorders in mammals, preferably humans. Such disorders include, but are not limited to, cancers of the ovaries, such as primary and secondary cancerous growth, endometrioid carcinoma of the ovary, ovarian papillary serous adenocarcinoma, ovarian mucinous adenocarcinoma, and ovarian Krukenberg tumors; and cancers of the breast, such as in situ carcinomas (e.g., ductal carcinoma in situ, Paget's disease, and lobular carcinoma in situ), invasive carcinomas (e.g., invasive ductal carcinoma, invasive lobular carcinoma, medullary carcinoma, colloid (mucinous) carcinoma, tubular carcinoma, and invasive papillary carcinoma), and fibroadenoma, pipillary carcinoma, secretory carcinoma, and apocrine carcinoma; and/or as described under “Hyperproliferative Disorders” and “Reproductive System Disorders” below. In preferred embodiments, polynucleotides expressed in a particular tissue type (see, e.g., Table 1A, column 7) are used to diagnose, detect, prevent, treat and/or prognose disorders associated with the tissue type.

[0400] Ovarian and/or breast cancer antigens are expressed in the ovaries and/or breast. For a number of ovarian and/or breast cancer-related disorders, substantially altered (increased or decreased) levels of ovarian and/or breast cancer antigen gene expression can be detected in ovarian and/or breast cancer tissue or other cells or bodily fluids (e.g., sera, plasma, urine, semen, synovial fluid or spinal fluid) taken from an individual having such a disorder, relative to a “standard” ovarian and/or breast cancer antigen gene expression level, that is, the ovarian and/or breast cancer antigen expression level in ovarian and/or breast cancer tissues or bodily fluids from an individual not having ovarian and/or breast cancer. Thus, the invention provides a diagnostic method useful during diagnosis of ovarian and/or breast cancer, which involves measuring the expression level of the gene encoding the ovarian and/or breast cancer associated polypeptide in ovarian and/or breast cancer tissue or other cells or body fluid from an individual and comparing the measured gene expression level with a standard ovarian and/or breast cancer antigens gene expression level, whereby an increase or decrease in the gene expression level(s) compared to the standard is indicative of an ovarian and/or breast cancer.

[0401] In specific embodiments, the invention provides a diagnostic method useful during diagnosis of a disorder of a normal or diseased tissue/cell source corresponding to column 7 of Table 1A, which involves measuring the expression level of the coding sequence of a polynucleotide sequence associated with this tissue/cell source as disclosed in Table 1A in the tissue/cell source or other cells or body fluid from an individual and comparing the expression level of the coding sequence with a standard expression level of the coding sequence of a polynucleotide sequence, whereby an increase or decrease in the gene expression level(s) compared to the standard is indicative of a disorder of a normal or diseased tissue/cell source corresponding to column 7 of Table 1A.

[0402] In particular, it is believed that certain tissues in mammals with cancer of cells or tissue of the ovarian and/or breast express significantly enhanced or reduced levels of normal or altered ovarian and/or breast cancer antigen expression and mRNA encoding the ovarian and/or breast cancer associated polypeptide when compared to a corresponding “standard” level. Further, it is believed that enhanced or depressed levels of the ovarian and/or breast cancer associated polypeptide can be detected in certain body fluids (e.g., sera, plasma, urine, and spinal fluid) or cells or tissue from mammals with such a cancer when compared to sera from mammals of the same species not having the cancer.

[0403] For example, as disclosed herein, ovarian and/or breast cancer associated polypeptides of the invention are expressed in the ovaries and/or breast, specifically tissues associated with ovarian and/or breast cancers. Accordingly, polynucleotides of the invention (e.g., polynucleotide sequences complementary to all or a portion of an ovarian and/or breast cancer antigen mRNA nucleotide sequence of SEQ ID NO:X, nucleotide sequence encoding SEQ ID NO:Y, nucleotide sequence encoding a polypeptide encoded by SEQ ID NO:X and/or a nucleotide sequence delineated by columns 8 and 9 of Table 2) and antibodies (and antibody fragments) directed against the polypeptides of the invention may be used to quantitate or qualitate concentrations of cells of the ovaries and/or breast expressing ovarian and/or breast cancer antigens, preferably on their cell surfaces. These polynucleotides and antibodies additionally have diagnostic applications in detecting abnormalities in the level of ovarian and/or breast cancer antigens gene expression, or abnormalities in the structure and/or temporal, tissue, cellular, or subcellular location of ovarian and/or breast cancer antigens. These diagnostic assays may be performed in vivo or in vitro, such as, for example, on blood samples, biopsy tissue or autopsy tissue. In specific embodiments, polynucleotides and antibodies of the invention are used to quantitate or qualitate tissues/cells corresponding to the library source disclosed in column 7 of Table 1A expressing the corresponding ovarian and/or breast cancer sequence disclosed in the same row of Table 1A, preferrably on their cell surface.

[0404] Thus, the invention provides a diagnostic method useful during diagnosis of ovarian and/or breast disorders, including cancers, which involves measuring the expression level of the gene encoding the ovarian and/or breast cancer antigen polypeptide in ovarian and/or breast tissue or other cells or body fluid from an individual and comparing the measured gene expression level with a standard ovarian and/or breast cancer antigen gene expression level, whereby an increase or decrease in the gene expression level compared to the standard is indicative of an ovarian and/or breast cancer. In specific embodiments, polynucleotides and antibodies of the invention are used to quantitate or qualitate tissues/cells corresponding to the library source disclosed in column 7 of Table 1A expressing the corresponding ovarian and/or breast cancer sequence disclosed in the same row of Table 1A, preferably on their cell surface.

[0405] Where a diagnosis of a disorder in the ovaries or breast, including diagnosis of a tumor, has already been made according to conventional methods, the present invention is useful as a prognostic indicator, whereby patients exhibiting enhanced or depressed ovarian and/or breast cancer antigen gene expression will experience a worse clinical outcome relative to patients expressing the gene at a level nearer the standard level.

[0406] By “assaying the expression level of the gene encoding the ovarian and/or breast cancer associated polypeptide” is intended qualitatively or quantitatively measuring or estimating the level of the ovarian and/or breast cancer antigen polypeptide or the level of the mRNA encoding the ovarian and/or breast cancer antigen polypeptide in a first biological sample either directly (e.g., by determining or estimating absolute protein level or mRNA level) or relatively (e.g., by comparing to the ovarian and/or breast cancer associated polypeptide level or mRNA level in a second biological sample). Preferably, the ovarian and/or breast cancer antigen polypeptide expression level or mRNA level in the first biological sample is measured or estimated and compared to a standard ovarian and/or breast cancer antigen polypeptide level or mRNA level, the standard being taken from a second biological sample obtained from an individual not having the disorder or being determined by averaging levels from a population of individuals not having a disorder of the ovaries and/or breast. As will be appreciated in the art, once a standard ovarian and/or breast cancer antigen polypeptide level or mRNA level is known, it can be used repeatedly as a standard for comparison.

[0407] By “biological sample” is intended any biological sample obtained from an individual, cell line, tissue culture, or other source containing ovarian and/or breast cancer antigen polypeptides (including portions thereof) or mRNA. As indicated, biological samples include body fluids (such as sera, plasma, urine, synovial fluid and spinal fluid) which contain cells expressing ovarian and/or breast cancer antigen polypeptides, ovarian and/or breast cancer tissue, and other tissue sources found to express the full length or fragments thereof of an ovarian and/or breast cancer antigen. Methods for obtaining tissue biopsies and body fluids from mammals are well known in the art. Where the biological sample is to include mRNA, a tissue biopsy is the preferred source.

[0408] Total cellular RNA can be isolated from a biological sample using any suitable technique such as the single-step guanidinium-thiocyanate-phenol-chloroform method described in Chomczynski and Sacchi, Anal. Biochem. 162:156-159 (1987). Levels of mRNA encoding the ovarian and/or breast cancer antigen polypeptides are then assayed using any appropriate method. These include Northern blot analysis, S1 nuclease mapping, the polymerase chain reaction (PCR), reverse transcription in combination with the polymerase chain reaction (RT-PCR), and reverse transcription in combination with the ligase chain reaction (RT-LCR).

[0409] The present invention also relates to diagnostic assays such as quantitative and diagnostic assays for detecting levels of ovarian and/or breast cancer antigen polypeptides, in a biological sample (e.g., cells and tissues), including determination of normal and abnormal levels of polypeptides. Thus, for instance, a diagnostic assay in accordance with the invention for detecting over-expression of ovarian and/or breast cancer antigens compared to normal control tissue samples may be used to detect the presence of tumors. Assay techniques that can be used to determine levels of a polypeptide, such as an ovarian and/or breast cancer antigen polypeptide of the present invention in a sample derived from a host are well-known to those of skill in the art. Such assay methods include radioimmunoassays, competitive-binding assays, Western Blot analysis and ELISA assays. Assaying ovarian and/or breast cancer antigen polypeptide levels in a biological sample can occur using any art-known method.

[0410] Assaying ovarian and/or breast cancer antigen polypeptide levels in a biological sample can occur using antibody-based techniques. For example, ovarian and/or breast cancer antigen polypeptide expression in tissues can be studied with classical immunohistological methods (Jalkanen et al., J. Cell. Biol. 101:976-985 (1985); Jalkanen, M., et al., J. Cell . Biol. 105:3087-3096 (1987)). Other antibody-based methods useful for detecting ovarian and/or breast cancer antigen polypeptide gene expression include immunoassays, such as the enzyme linked immunosorbent assay (ELISA) and the radioimmunoassay (RIA). Suitable antibody assay labels are known in the art and include enzyme labels, such as, glucose oxidase, and radioisotopes, such as iodine (¹²⁵I, ¹²¹I), carbon (¹⁴C), sulfur (³⁵S), tritium (³H), indium (¹¹²In), and technetium (^{99m}Tc), and fluorescent labels, such as fluorescein and rhodamine, and biotin.

[0411] The tissue or cell type to be analyzed will generally include those which are known, or suspected, to express the ovarian and/or breast cancer antigen gene (such as, for example, cells of the ovaries and/or breast or ovarian and/or breast cancer). The protein isolation methods employed herein may, for example, be such as those described in Harlow and Lane (Harlow, E. and Lane, D., 1988, “Antibodies: A Laboratory Manual”, Cold Spring Harbor Laboratory Press, Cold Spring Harbor, New York), which is incorporated herein by reference in its entirety. The isolated cells can be derived from cell culture or from a patient. The analysis of cells taken from culture may be a necessary step in the assessment of cells that could be used as part of a cell-based gene therapy technique or, alternatively, to test the effect of compounds on the expression of the ovarian and/or breast cancer antigen gene.

[0412] For example, antibodies, or fragments of antibodies, such as those described herein, may be used to quantitatively or qualitatively detect the presence of ovarian and/or breast cancer antigen gene products or conserved variants or peptide fragments thereof. This can be accomplished, for example, by immunofluorescence techniques employing a fluorescently labeled antibody coupled with light microscopic, flow cytometric, or fluorimetric detection.

[0413] In a preferred embodiment, antibodies, or fragments of antibodies directed to any one or all of the predicted epitope domains of the ovarian and/or breast cancer antigen polypeptides (Shown in Table 1A, column 6) may be used to quantitatively or qualitatively detect the presence of ovarian and/or breast cancer antigen gene products or conserved variants or peptide fragments thereof. This can be accomplished, for example, by immunofluorescence techniques employing a fluorescently labeled antibody coupled with light microscopic, flow cytometric, or fluorimetric detection.

[0414] In an additional preferred embodiment, antibodies, or fragments of antibodies directed to a conformational epitope of an ovarian and/or breast cancer antigen may be used to quantitatively or qualitatively detect the presence of ovarian and/or breast cancer antigen gene products or conserved variants or peptide fragments thereof. This can be accomplished, for example, by immunofluorescence techniques employing a fluorescently labeled antibody coupled with light microscopic, flow cytometric, or fluorimetric detection.

[0415] The antibodies (or fragments thereof), and/or ovarian and/or breast cancer antigen polypeptides of the present invention may, additionally, be employed histologically, as in immunofluorescence, immunoelectron microscopy or non-immunological assays, for in situ detection of ovarian and/or breast cancer antigen gene products or conserved variants or peptide fragments thereof. In situ detection may be accomplished by removing a histological specimen from a patient, and applying thereto a labeled antibody or ovarian and/or breast cancer antigen polypeptide of the present invention. The antibody (or fragment thereof) or ovarian and/or breast cancer antigen polypeptide is preferably applied by overlaying the labeled antibody (or fragment) onto a biological sample. Through the use of such a procedure, it is possible to determine not only the presence of the ovarian and/or breast cancer antigen gene product, or conserved variants or peptide fragments, or ovarian and/or breast cancer antigen polypeptide binding, but also its distribution in the examined tissue. Using the present invention, those of ordinary skill will readily perceive that any of a wide variety of histological methods (such as staining procedures) can be modified in order to achieve such in situ detection.

[0416] Immunoassays and non-immunoassays for ovarian and/or breast cancer antigen gene products or conserved variants or peptide fragments thereof will typically comprise incubating a sample, such as a biological fluid, a tissue extract, freshly harvested cells, or lysates of cells which have been, incubated in cell culture, in the presence of a detectably labeled antibody capable of binding ovarian and/or breast cancer antigen gene products or conserved variants or peptide fragments thereof, and detecting the bound antibody by any of a number of techniques well-known in the art.

[0417] The biological sample may be brought in contact with and immobilized onto a solid phase support or carrier such as nitrocellulose, or other solid support which is capable of immobilizing cells, cell particles or soluble proteins. The support may then be washed with suitable buffers followed by treatment with the detectably labeled anti-ovarian and/or breast cancer antigen antibody or detectable ovarian and/or breast cancer antigen polypeptide. The solid phase support may then be washed with the buffer a second time to remove unbound antibody or polypeptide. Optionally the antibody is subsequently labeled. The amount of bound label on solid support may then be detected by conventional means.

[0418] By “solid phase support or carrier” is intended any support capable of binding an antigen or an antibody. Well-known supports or carriers include glass, polystyrene, polypropylene, polyethylene, dextran, nylon, amylases, natural and modified celluloses, polyacrylamides, gabbros, and magnetite. The nature of the carrier can be either soluble to some extent or insoluble for the purposes of the present invention. The support material may have virtually any possible structural configuration so long as the coupled molecule is capable of binding to an antigen or antibody. Thus, the support configuration may be spherical, as in a bead, or cylindrical, as in the inside surface of a test tube, or the external surface of a rod. Alternatively, the surface may be flat such as a sheet, test strip, etc. Preferred supports include polystyrene beads. Those skilled in the art will know many other suitable carriers for binding antibody or antigen, or will be able to ascertain the same by use of routine experimentation.

[0419] The binding activity of a given lot of anti-ovarian and/or breast cancer antigen antibody or ovarian and/or breast cancer antigen polypeptide may be determined according to well known methods. Those skilled in the art will be able to determine operative and optimal assay conditions for each determination by employing routine experimentation.

[0420] In addition to assaying ovarian and/or breast cancer antigen polypeptide levels or polynucleotide levels in a biological sample obtained from an individual, ovarian and/or breast cancer antigen polypeptide or polynucleotide can also be detected in vivo by imaging. For example, in one embodiment of the invention, ovarian and/or breast cancer antigen polypeptide and/or anti-ovarian and/or breast cancer antigen antibodies are used to image ovarian or breast diseased cells, such as neoplasms. In another embodiment, ovarian and/or breast cancer antigen polynucleotides of the invention (e.g., polynucleotides complementary to all or a portion of ovarian and/or breast cancer antigen mRNA) and/or anti-ovarian and/or breast cancer antigen antibodies (e.g., antibodies directed to any one or a combination of the epitopes of ovarian and/or breast cancer antigens, antibodies directed to a conformational epitope of ovarian and/or breast cancer antigens, antibodies directed to the full length polypeptide expressed on the cell surface of a mammalian cell) are used to image diseased or neoplastic cells of the ovaries and/or breast.

[0421] Antibody labels or markers for in vivo imaging of ovarian and/or breast cancer antigen polypeptides include those detectable by X-radiography, NMR, MRI, CAT-scans or ESR. For X-radiography, suitable labels include radioisotopes such as barium or cesium, which emit detectable radiation but are not overtly harmful to the subject. Suitable markers for NMR and ESR include those with a detectable characteristic spin, such as deuterium, which may be incorporated into the antibody by labeling of nutrients for the relevant hybridoma. Where in vivo imaging is used to detect enhanced levels of ovarian and/or breast cancer antigen polypeptides for diagnosis in humans, it may be preferable to use human antibodies or “humanized” chimeric monoclonal antibodies. Such antibodies can be produced using techniques described herein or otherwise known in the art. For example methods for producing chimeric antibodies are known in the art. See, for review, Morrison, Science 229:1202 (1985); Oi et al., BioTechniques 4:214 (1986); Cabilly et al., U.S. Pat. No. 4,816,567; Taniguchi et al., EP 171496; Morrison et al., EP 173494; Neuberger et al., WO 8601533; Robinson et al., WO 8702671; Boulianne et al., Nature 312:643 (1984); Neuberger et al., Nature 314:268 (1985).

[0422] Additionally, any ovarian and/or breast cancer antigen polypeptides whose presence can be detected, can be administered. For example, ovarian and/or breast cancer antigen polypeptides labeled with a radio-opaque or other appropriate compound can be administered and visualized in vivo, as discussed, above for labeled antibodies. Further such ovarian and/or breast cancer antigen polypeptides can be utilized for in vitro diagnostic procedures.

[0423] An ovarian and/or breast cancer antigen polypeptide-specific antibody or antibody fragment which has been labeled with an appropriate detectable imaging moiety, such as a radioisotope (for example, ¹³¹I, ¹¹²In, ^{99m}Tc), a radio-opaque substance, or a material detectable by nuclear magnetic resonance, is introduced (for example, parenterally, subcutaneously or intraperitoneally) into the mammal to be examined for an ovarian and/or breast cancer. It will be understood in the art that the size of the subject and the imaging system used will determine the quantity of imaging moiety needed to produce diagnostic images. In the case of a radioisotope moiety, for a human subject, the quantity of radioactivity injected will normally range from about 5 to 20 millicuries of ^{99m}Tc. The labeled antibody or antibody fragment will then preferentially accumulate at the location of cells which contain ovarian and/or breast cancer antigen protein. In vivo tumor imaging is described in S. W. Burchiel et al., “Immunopharmacokinetics of Radiolabeled Antibodies and Their Fragments” (Chapter 13 in Tumor Imaging: The Radiochemical Detection of Cancer, S. W. Burchiel and B. A. Rhodes, eds., Masson Publishing Inc. (1982)).

[0424] With respect to antibodies, one of the ways in which the anti-ovarian and/or breast cancer antigen antibody can be detectably labeled is by linking the same to an enzyme and using the linked product in an enzyme immunoassay (EIA) (Voller, A., “The Enzyme Linked Immunosorbent Assay (ELISA)”, 1978, Diagnostic Horizons 2:1-7, Microbiological Associates Quarterly Publication, Walkersville, Md.); Voller et al., J. Clin. Pathol. 31:507-520 (1978); Butler, J. E., Meth. Enzymol. 73:482-523 (1981); Maggio, E. (ed.), 1980, Enzyme Immunoassay, CRC Press, Boca Raton, Fla.,; Ishikawa, E. et al., (eds.), 1981, Enzyme Immunoassay, Kgaku Shoin, Tokyo). The enzyme which is bound to the antibody will react with an appropriate substrate, preferably a chromogenic substrate, in such a manner as to produce a chemical moiety which can be detected, for example, by spectrophotometric, fluorimetric or by visual means. Enzymes which can be used to detectably label the antibody include, but are not limited to, malate dehydrogenase, staphylococcal nuclease, delta-5-steroid isomerase, yeast alcohol dehydrogenase, alpha-glycerophosphate, dehydrogenase, triose phosphate isomerase, horseradish peroxidase, alkaline phosphatase, asparaginase, glucose oxidase, beta-galactosidase, ribonuclease, urease, catalase, glucose-6-phosphate dehydrogenase, glucoamylase and acetylcholinesterase. Additionally, the detection can be accomplished by colorimetric methods which employ a chromogenic substrate for the enzyme. Detection may also be accomplished by visual comparison of the extent of enzymatic reaction of a substrate in comparison with similarly prepared standards.

[0425] Detection may also be accomplished using any of a variety of other immunoassays. For example, by radioactively labeling the antibodies or antibody fragments, it is possible to detect ovarian and/or breast cancer antigens through the use of a radioimmunoassay (RIA) (see, for example, Weintraub, B., Principles of Radioimmunoassays, Seventh Training Course on Radioligand Assay Techniques, The Endocrine Society, March, 1986, which is incorporated by reference herein). The radioactive isotope can be detected by means including, but not limited to, a gamma counter, a scintillation counter, or autoradiography.

[0426] It is also possible to label the antibody with a fluorescent compound. When the fluorescently labeled antibody is exposed to light of the proper wave length, its presence can then be detected due to fluorescence. Among the most commonly used fluorescent labeling compounds are fluorescein isothiocyanate, rhodamine, phycoerythrin, phycocyanin, allophycocyanin, ophthaldehyde and fluorescamine.

[0427] The antibody can also be detectably labeled using fluorescence emitting metals such as ¹⁵²Eu, or others of the lanthanide series. These metals can be attached to the antibody using such metal chelating groups as diethylenetriaminepentacetic acid (DTPA) or ethylenediaminetetraacetic acid (EDTA).

[0428] The antibody also can be detectably labeled by coupling it to a chemiluminescent compound. The presence of the chemiluminescent-tagged antibody is then determined by detecting the presence of luminescence that arises during the course of a chemical reaction. Examples of particularly useful chemiluminescent labeling compounds are luminol, isoluminol, theromatic acridinium ester, imidazole, acridinium salt and oxalate ester.

[0429] Likewise, a bioluminescent compound may be used to label the antibody of the present invention. Bioluminescence is a type of chemiluminescence found in biological systems in, which a catalytic protein increases the efficiency of the chemiluminescent reaction. The presence of a bioluminescent protein is determined by detecting the presence of luminescence. Important bioluminescent compounds for purposes of labeling are luciferin, luciferase and aequorin.

[0430] Methods for Detecting Ovarian and/or Breast Cancer

[0431] In general, an ovarian and/or breast cancer may be detected in a patient based on the presence of one or more ovarian and/or breast cancer antigen proteins of the invention and/or polynucleotides encoding such proteins in a biological sample (for example, blood, sera, urine, and/or tumor biopsies) obtained from the patient. In other words, such proteins and/or polynucleotides may be used as markers to indicate the presence or absence of an ovarian and/or breast cancer. Cancers that may be diagnosed, and/or prognosed using the compositions of the invention include but are not limited to, ovarian cancer or breast cancer. In addition, such proteins and/or polynucleotides may be useful for the detection of other diseases and cancers, including cancers of tissues/cells corresponding to the library source disclosed in column 7 of Table 1A expressing the corresponding ovarian and/or breast cancer sequence disclosed in the same row of Table 1A. The binding agents provided herein generally permit detection of the level of antigen that binds to the agent in the biological sample. Polynucleotide primers and probes may be used to detect the level of mRNA encoding ovarian and/or breast cancer antigen polypeptides, which is also indicative of the presence or absence of ovarian and/or breast cancer. In general, ovarian and/or breast cancer antigen polypeptides should be present at a level that is at least three fold higher in diseased tissue than in normal tissue.

[0432] There are a variety of assay formats known to those of ordinary skill in the art for using a binding agent to detect polypeptide markers in a sample. See, e.g., Harlow and Lane, supra. In general, the presence or absence of ovarian and/or breast cancer in a patient may be determined by (a) contacting a biological sample obtained from a patient with a binding agent; (b) detecting in the sample a level of polypeptide that binds to the binding agent; and (c) comparing the level of polypeptide with a predetermined cut-off value.

[0433] In a preferred embodiment, the assay involves the use of binding agent immobilized on a solid support to bind to and remove the ovarian and/or breast cancer antigen polypeptide of the invention from the remainder of the sample. The bound polypeptide may then be detected using a detection reagent that contains a reporter group and specifically binds to the binding agent/polypeptide complex. Such detection reagents may comprise, for example, a binding agent that specifically binds to the polypeptide or an antibody or other agent that specifically binds to the binding agent, such as an anti-immunoglobulin, protein G, protein A or a lectin. Alternatively, a competitive assay may be utilized, in which a polypeptide is labeled with a reporter group and allowed to bind to the immobilized binding agent after incubation of the binding agent with the sample. The extent to which components of the sample inhibit the binding of the labeled polypeptide to the binding agent is indicative of the reactivity of the sample with the immobilized binding agent. Suitable polypeptides for use within such assays include ovarian and/or breast cancer antigen polypeptides and portions thereof, or antibodies, to which the binding agent binds, as described above.

[0434] The solid support may be any material known to those of skill in the art to which ovarian and/or breast cancer antigen polypeptides of the invention may be attached. For example, the solid support may be a test well in a microtiter plate or a nitrocellulose or other suitable membrane. Alternatively, the support may be a bead or disc, such as glass fiberglass, latex or a plastic material such as polystyrene or polyvinylchloride. The support may also be a magnetic particle or a fiber optic sensor, such as those disclosed, for example, in U.S. Pat. No. 5,359,681. The binding agent may be immobilized on the solid support using a variety of techniques known to those of skill in the art, which are amply described in the patent and scientific literature. In the context of the present invention, the term “immobilization” refers to both noncovalent association, such as adsorption, and covalent attachment (which may be a direct linkage between the agent and functional groups on the support or may be a linkage by way of a cross-linking agent). Immobilization by adsorption to a well in a microtiter plate or to a membrane is preferred. In such cases, adsorption may be achieved by contacting the binding agent, in a suitable buffer, with the solid support for the suitable amount of time. The contact time varies with temperature, but is typically between about 1 hour and about 1 day. In general, contacting a well of plastic microtiter plate (such as polystyrene or polyvinylchloride) with an amount of binding agent ranging from about 10 ng to about 10 ug, and preferably about 100 ng to about 1 ug, is sufficient to immobilize an adequate amount of binding agent.

[0435] Covalent attachment of binding agent to a solid support may generally be achieved by first reacting the support with a bifunctional reagent that will react with both the support and a functional group, such as a hydroxyl or amino group, on the binding agent. For example, the binding agent may be covalently attached to supports having an appropriate polymer coating using benzoquinone or by condensation of an aldehyde group on the support with an amine and an active hydrogen on the binding partner (see, e.g., Pierce Immunotechnology Catalog and Handbook, 1991, at A12-A13).

[0436] Gene Therapy Methods

[0437] Also encompassed by the present invention are gene therapy methods for treating or preventing disorders, diseases and conditions. The gene therapy methods relate to the introduction of nucleic acid (DNA, RNA and antisense DNA or RNA) sequences into an animal to achieve expression of a ovarian and/or breast cancer antigen of the present invention. This method requires a polynucleotide which codes for a polypeptide of the present invention operatively linked to a promoter and any other genetic elements necessary for the expression of the polypeptide by the target tissue. Such gene therapy and delivery techniques are known in the art, see, for example, WO90/11092, which is herein incorporated by reference.

[0438] Thus, for example, cells from a patient may be engineered with a polynucleotide (DNA or RNA) comprising a promoter operably linked to a polynucleotide of the present invention ex vivo, with the engineered cells then being provided to a patient to be treated with the polypeptide of the present invention. Such methods are well-known in the art. For example, see Belldegrun, A., et al., J. Natl. Cancer Inst. 85: 207-216 (1993); Ferrantini, M. et al., Cancer Research 53: 1107-1112 (1993); Ferrantini, M. et al., J. Immunology 153: 4604-4615 (1994); Kaido, T., et al., Int. J. Cancer 60: 221-229 (1995); Ogura, H., et al., Cancer Research 50: 5102-5106 (1990); Santodonato, L., et al., Human Gene Therapy 7:1-10 (1996); Santodonato, L., et al., Gene Therapy 4:1246-1255 (1997); and Zhang, J.-F. et al., Cancer Gene Therapy 3: 31-38 (1996)), which are herein incorporated by reference. In one embodiment, the cells, which are engineered are arterial cells. The arterial cells may be reintroduced into the patient through direct injection to the artery, the tissues surrounding the artery, or through catheter injection.

[0439] As discussed in more detail below, the polynucleotide constructs can be delivered by any method that delivers injectable materials to the cells of an animal, such as, injection into the interstitial space of tissues (heart, muscle, skin, lung, liver, and the like). The polynucleotide constructs may be delivered in a pharmaceutically acceptable liquid or aqueous carrier.

[0440] In one embodiment, the polynucleotide of the present invention is delivered as a naked polynucleotide. The term “naked” polynucleotide, DNA or RNA refers to sequences that are free from any delivery vehicle that acts to assist, promote or facilitate entry into the cell, including viral sequences, viral particles, liposome formulations, lipofectin or precipitating agents and the like. However, the polynucleotide of the present invention can also be delivered in liposome formulations and lipofectin formulations and the like can be prepared by methods well known to those skilled in the art. Such methods are described, for example, in U.S. Pat. Nos. 5,593,972, 5,589,466, and 5,580,859, which are herein incorporated by reference.

[0441] The polynucleotide vector constructs used in the gene therapy method are preferably constructs that will not integrate into the host genome nor will they contain sequences that allow for replication. Appropriate vectors include pWLNEO, pSV2CAT, pOG44, pXT1 and pSG available from Stratagene; pSVK3, pBPV, pMSG and pSVL available from Pharmacia; and pEF1/V5, pcDNA3.1, and pRc/CMV2 available from Invitrogen. Other suitable vectors will be readily apparent to the skilled artisan.

[0442] Any strong promoter known to those skilled in the art can be used for driving the expression of the polynucleotide sequence. Suitable promoters include adenoviral promoters, such as the adenoviral major late promoter; or heterologous promoters, such as the cytomegalovirus (CMV) promoter; the respiratory syncytial virus (RSV) promoter; inducible promoters, such as the MMT promoter, the metallothionein promoter; heat shock promoters; the albumin promoter; the ApoAI promoter; human globin promoters; viral thymidine kinase promoters, such as the Herpes Simplex thymidine kinase promoter; retroviral LTRs; the b-actin promoter; and human growth hormone promoters. The promoter also may be the native promoter for the polynucleotide of the present invention.

[0443] Unlike other gene therapy techniques, one major advantage of introducing naked nucleic acid sequences into target cells is the transitory nature of the polynucleotide synthesis in the cells. Studies have shown that non-replicating DNA sequences can be introduced into cells to provide production of the desired polypeptide for periods of up to six months.

[0444] The polynucleotide construct can be delivered to the interstitial space of tissues within the an animal, including of muscle, skin, brain, lung, liver, spleen, bone marrow, thymus, heart, lymph, blood, bone, cartilage, pancreas, kidney, gall bladder, stomach, intestine, testis, ovary, uterus, rectum, nervous system, eye, gland, and connective tissue. Interstitial space of the tissues comprises the intercellular, fluid, mucopolysaccharide matrix among the reticular fibers of organ tissues, elastic fibers in the walls of vessels or chambers, collagen fibers of fibrous tissues, or that same matrix within connective tissue ensheathing muscle cells or in the lacunae of bone. It is similarly the space occupied by the plasma of the circulation and the lymph fluid of the lymphatic channels. Delivery to the interstitial space of muscle tissue is preferred for the reasons discussed below. They may be conveniently delivered by injection into the tissues comprising these cells. They are preferably delivered to and expressed in persistent, non-dividing cells which are differentiated, although delivery and expression may be achieved in non-differentiated or less completely differentiated cells, such as, for example, stem cells of blood or skin fibroblasts. In vivo muscle cells are particularly competent in their ability to take up and express polynucleotides.

[0445] For the naked nucleic acid sequence injection, an effective dosage amount of DNA or RNA will be in the range of from about 0.05 mg/kg body weight to about 50 mg/kg body weight. Preferably the dosage will be from about 0.005 mg/kg to about 20 mg/kg and more preferably from about 0.05 mg/kg to about 5 mg/kg. Of course, as the artisan of ordinary skill will appreciate, this dosage will vary according to the tissue site of injection. The appropriate and effective dosage of nucleic acid sequence can readily be determined by those of ordinary skill in the art and may depend on the condition being treated and the route of administration.

[0446] The preferred route of administration is by the parenteral route of injection into the interstitial space of tissues. However, other parenteral routes may also be used, such as, inhalation of an aerosol formulation particularly for delivery to lungs or bronchial tissues, throat or mucous membranes of the nose. In addition, naked DNA constructs can be delivered to arteries during angioplasty by the catheter used in the procedure.

[0447] The naked polynucleotides are delivered by any method known in the art, including, but not limited to, direct needle injection at the delivery site, intravenous injection, topical administration, catheter infusion, and so-called “gene guns”. These delivery methods are known in the art.

[0448] The constructs may also be delivered with delivery vehicles such as viral sequences, viral particles, liposome formulations, lipofectin, precipitating agents, etc. Such methods of delivery are known in the art.

[0449] In certain embodiments, the polynucleotide constructs are complexed in a liposome preparation. Liposomal preparations for use in the instant invention include cationic (positively charged), anionic (negatively charged) and neutral preparations. However, cationic liposomes are particularly preferred because a tight charge complex can be formed between the cationic liposome and the polyanionic nucleic acid. Cationic liposomes have been shown to mediate intracellular delivery of plasmid DNA (Felgner et al., Proc. Natl. Acad. Sci. USA (1987) 84:7413-7416, which is herein incorporated by reference); mRNA (Malone et al., Proc. Natl. Acad. Sci. USA (1989) 86:6077-6081, which is herein incorporated by reference); and purified transcription factors (Debs et al., J. Biol. Chem. (1990) 265:10189-10192, which is herein incorporated by reference), in functional form.

[0450] Cationic liposomes are readily available. For example, N[1-2,3-dioleyloxy)propyl]-N,N,N-triethylammonium (DOTMA) liposomes are particularly useful and are available under the trademark Lipofectin, from GIBCO BRL, Grand Island, N.Y., (see, also, Felgner et al., Proc. Natl Acad. Sci. USA (1987) 84:7413-7416, which is herein incorporated by reference). Other commercially available liposomes include transfectace (DDAB/DOPE) and DOTAP/DOPE (Boehringer).

[0451] Other cationic liposomes can be prepared from readily available materials using techniques well known in the art. See, e.g. PCT Publication No. WO 90/11092 (which is herein incorporated by reference) for a description of the synthesis of DOTAP (1,2-bis(oleoyloxy)-3-(trimethylammonio)propane) liposomes. Preparation of DOTMA liposomes is explained in the literature, see, e.g., P. Felgner et at., Proc. Natl. Acad. Sci. USA 84:7413-7417, which is herein incorporated by reference. Similar methods can be used to prepare liposomes from other cationic lipid materials.

[0452] Similarly, anionic and neutral liposomes are readily available, such as from Avanti Polar Lipids (Birmingham, Ala.), or can be easily prepared using readily available materials. Such materials include phosphatidyl choline, cholesterol, phosphatidyl ethanotamine, dioleoylphosphatidyl choline (DOPC), dioleoylphosphatidyl glycerol (DOPG), dioleoylphoshatidyl ethanolamine (DOPE), among others. These materials can also be mixed with the DOTMA and DOTAP starting materials in appropriate ratios. Methods for making liposomes using these materials are well known in the art.

[0453] For example, commercially dioleoylphosphatidyl choline (DOPC), dioleoylphosphatidyl glycerol (DOPG), and dioleoylphosphatidyl ethanolamine (DOPE) can be used in various combinations to make conventional liposomes, with or without the addition of cholesterol. Thus, for example, DOPG/DOPC vesicles can be prepared by drying 50 mg each of DOPG and DOPC under a stream of nitrogen gas into a sonication vial. The sample is placed under a vacuum pump overnight and is hydrated the following day with deionized water. The sample is then sonicated for 2 hours in a capped vial, using a Heat Systems model 350 sonicator equipped with an inverted cup (bath type) probe at the maximum setting while the bath is circulated at 15SEC. Alternatively, negatively charged vesicles can be prepared without sonication to produce multilamellar vesicles or by extrusion through nucleopore membranes to produce unilamellar vesicles of discrete size. Other methods are known and available to those of skill in the art.

[0454] The liposomes can comprise multilamellar vesicles (MLVs), small unilamellar vesicles (SUVs), or large unilamellar vesicles (LUVs), with SUVs being preferred. The various liposome-nucleic acid complexes are prepared using methods well known in the art. See, e.g., Straubinger et al., Methods of Immunology (1983), 101:512-527, which is herein incorporated by reference. For example, MLVs containing nucleic acid can be prepared by depositing a thin film of phospholipid on the walls of a glass tube and subsequently hydrating with a solution of the material to be encapsulated. SUVs are prepared by extended sonication of MLVs to produce a homogeneous population of unilamellar liposomes. The material to be entrapped is added to a suspension of preformed MLVs and then sonicated. When using liposomes containing cationic lipids, the dried lipid film is resuspended in an appropriate solution such as sterile water or an isotonic buffer solution such as 10 mM Tris/NaCl, sonicated, and then the preformed liposomes are mixed directly with the DNA. The liposome and DNA form a very stable complex due to binding of the positively charged liposomes to the cationic DNA. SUVs find use with small nucleic acid fragments. LUVs are prepared by a number of methods, well known in the art. Commonly used methods include Ca²⁺-EDTA chelation (Papahadjopoulos et al., Biochim. Biophys. Acta (1975) 394:483; Wilson et al., Cell 17:77 (1979); ether injection (Deamer, D. and Bangham, A., Biochim. Biophys. Acta 443:629 (1976); Ostro et al., Biochem. Biophys. Res. Commun. 76:836 (1977); Fraley et al., Proc. Natl. Acad. Sci. USA 76:3348 (1979)); detergent dialysis (Enoch, H. and Strittmatter, P., Proc. Natl. Acad. Sci. USA 76:145 (1979)); and reverse-phase evaporation (REV) (Fraley et al., J. Biol. Chem. 255:10431 (1980); Szoka et al., Proc. Natl. Acad. Sci. USA 75:145 (1978); Schaefer-Ridder et al., Science 215:166 (1982)), which are herein incorporated by reference.

[0455] Generally, the ratio of DNA to liposomes will be from about 10:1 to about 1:10. Preferably, the ration will be from about 5:1 to about 1:5. More preferably, the ration will be about 3:1 to about 1:3. Still more preferably, the ratio will be about 1:1.

[0456] U.S. Pat. No. 5,676,954 (which is herein incorporated by reference) reports on the injection of genetic material, complexed with cationic liposomes carriers, into mice. U.S. Pat. Nos. 4,897,355, 4,946,787, 5,049,386, 5,459,127, 5,589,466, 5,693,622, 5,580,859, 5,703,055, and international publication no. WO 94/9469 (which are herein incorporated by reference) provide cationic lipids for use in transfecting DNA into cells and mammals. U.S. Pat. Nos. 5,589,466, 5,693,622, 5,580,859, 5,703,055, and International Publication No. WO 94/9469 provide methods for delivering DNA-cationic lipid complexes to mammals.

[0457] In certain embodiments, cells are engineered, ex vivo or in vivo, using a retroviral particle containing RNA which comprises a sequence encoding a polypeptide of the present invention. Retroviruses from which the retroviral plasmid vectors may be derived include, but are not limited to, Moloney Murine Leukemia Virus, spleen necrosis virus, Rous sarcoma Virus, Harvey Sarcoma Virus, avian leukosis virus, gibbon ape leukemia virus, human immunodeficiency virus, Myeloproliferative Sarcoma Virus, and mammary tumor virus.

[0458] The retroviral plasmid vector is employed to transduce packaging cell lines to form producer cell lines. Examples of packaging cells which may be transfected include, but are not limited to, the PE501, PA317, R-2, R-AM, PA12, T19-14X, VT-19-17-H2, RCRE, RCRIP, GP+E−86, GP+envAm12, and DAN cell lines as described in Miller, Human Gene Therapy 1:5-14 (1990), which is incorporated herein by reference in its entirety. The vector may transduce the packaging cells through any means known in the art. Such means include, but are not limited to, electroporation, the use of liposomes, and CaPO₄ precipitation. In one alternative, the retroviral plasmid vector may be encapsulated into a liposome, or coupled to a lipid, and then administered to a host.

[0459] The producer cell line generates infectious retroviral vector particles which include polynucleotide encoding a polypeptide of the present invention. Such retroviral vector particles then may be employed, to transduce eukaryotic cells, either in vitro or in vivo. The transduced eukaryotic cells will express a polypeptide of the present invention.

[0460] In certain other embodiments, cells are engineered, ex vivo or in vivo, with polynucleotide contained in an adenovirus vector. Adenovirus can be manipulated such that it encodes and expresses a polypeptide of the present invention, and at the same time is inactivated in terms of its ability to replicate in a normal lytic viral life cycle. Adenovirus expression is achieved without integration of the viral DNA into the host cell chromosome, thereby alleviating concerns about insertional mutagenesis. Furthermore, adenoviruses have been used as live enteric vaccines for many years with an excellent safety profile (Schwartz, et al., Am. Rev. Respir. Dis. 109:233-238 (1974)). Finally, adenovirus mediated gene transfer has been demonstrated in a number of instances including transfer of alpha-1-antitrypsin and CFTR to the lungs of cotton rats (Rosenfeld et al., Science 252:431-434 (1991); Rosenfeld et al., Cell 68:143-155 (1991)). Furthermore, extensive studies to attempt to establish adenovirus as a causative agent in human cancer were uniformly negative (Green et al., Proc. Natl. Acad. Sci. USA 76:6606 (1979)).

[0461] Suitable adenoviral vectors useful in the present invention are described, for example, in Kozarsky and Wilson, Curr. Opin. Genet. Devel. 3:499-503 (1993); Rosenfeld et al., Cell 68:143-155 (1992); Engelhardt et al., Human Genet. Ther. 4:759-769 (1993); Yang et al., Nature Genet. 7:362-369 (1994); Wilson et al., Nature 365:691-692 (1993); and U.S. Pat. No. 5,652,224, which are herein incorporated by reference. For example, the adenovirus vector Ad2 is useful and can be grown in human 293 cells. These cells contain the E1 region of adenovirus and constitutively express E1a and E1b, which complement the defective adenoviruses by providing the products of the genes deleted from the vector. In addition to Ad2, other varieties of adenovirus (e.g., Ad3, Ad5, and Ad7) are also useful in the present invention.

[0462] Preferably, the adenoviruses used in the present invention are replication deficient. Replication deficient adenoviruses require the aid of a helper virus and/or packaging cell line to form infectious particles. The resulting virus is capable of infecting cells and can express a polynucleotide of interest which is operably linked to a promoter, but cannot replicate in most cells. Replication deficient adenoviruses may be deleted in one or more of all or a portion of the following genes: E1a, E1b, E3, E4, E2a, or L1 through L5.

[0463] In certain other embodiments, the cells are engineered, ex vivo or in vivo, using an adeno-associated virus (AAV). AAVs are naturally occurring defective viruses that require helper viruses to produce infectious particles (Muzyczka, N., Curr. Topics in Microbiol. Immunol. 158:97 (1992)). It is also one of the few viruses that may integrate its DNA into non-dividing cells. Vectors containing as little as 300 base pairs of AAV can be packaged and can integrate, but space for exogenous DNA is limited to about 4.5 kb. Methods for producing and using such AAVs are known in the art. See, for example, U.S. Pat. Nos. 5,139,941, 5,173,414, 5,354,678, 5,436,146, 5,474,935, 5,478,745, and 5,589,377.

[0464] For example, an appropriate AAV vector for use in the present invention will include all the sequences necessary for DNA replication, encapsidation, and host-cell integration. The polynucleotide construct is inserted into the AAV vector using standard cloning methods, such as those found in Sambrook et al., Molecular Cloning: A Laboratory Manual, Cold Spring Harbor Press (1989). The recombinant AAV vector is then transfected into packaging cells which are infected with a helper virus, using any standard technique, including lipofection, electroporation, calcium phosphate precipitation, etc. Appropriate helper viruses include adenoviruses, cytomegaloviruses, vaccinia viruses, or herpes viruses. Once the packaging cells are transfected and infected, they will produce infectious AAV viral particles which contain the polynucleotide construct. These viral particles are then used to transduce eukaryotic cells, either ex vivo or in vivo. The transduced cells will contain the polynucleotide construct integrated into its genome, and will express a polypeptide of the invention.

[0465] Another method of gene therapy involves operably associating heterologous control regions and endogenous ovarian and/or breast cancer antigen polynucleotide sequences (e.g., encoding a ovarian and/or breast cancer antigen polypeptide of the present invention) via homologous recombination (see, e.g., U.S. Pat. No. 5,641,670, issued Jun. 24, 1997; International Publication No. WO 96/29411, published Sep. 26, 1996; International Publication No. WO 94/12650, published Aug. 4, 1994; Koller et al., Proc. Natl. Acad. Sci. USA 86:8932-8935 (1989); and Zijlstra et al., Nature 342:435-438 (1989), which are herein incorporated by reference. This method involves the activation of a gene which is present in the target cells, but which is not normally expressed in the cells, or is expressed at a lower level than desired.

[0466] Polynucleotide constructs are made, using standard techniques known in the art, which contain the promoter with targeting sequences flanking the promoter. Suitable promoters are described herein. The targeting sequence is sufficiently complementary to an endogenous sequence to permit homologous recombination of the promoter-targeting sequence with the endogenous sequence. The targeting sequence will be sufficiently near the 5′ end of the desired endogenous polynucleotide sequence so the promoter will be operably linked to the endogenous sequence upon homologous recombination.

[0467] The promoter and the targeting sequences can be amplified using PCR. Preferably, the amplified promoter contains distinct restriction enzyme sites on the 5′ and 3′ ends. Preferably, the 3′ end of the first targeting sequence contains the same restriction enzyme site as the 5′ end of the amplified promoter and the 5′ end of the second targeting sequence contains the same restriction site as the 3′ end of the amplified promoter. The amplified promoter and targeting sequences are digested and ligated together.

[0468] The promoter-targeting sequence construct is delivered to the cells, either as naked polynucleotide, or in conjunction with transfection-facilitating agents, such as liposomes, viral sequences, viral particles, whole viruses, lipofection, precipitating agents, etc., described in more detail above. The P promoter-targeting sequence can be delivered by any method, included direct needle injection, intravenous injection, topical administration, catheter infusion, particle accelerators, etc. The methods are described in more detail below.

[0469] The promoter-targeting sequence construct is taken up by cells. Homologous recombination between the construct and the endogenous sequence takes place, such that an endogenous sequence is placed under the control of the promoter. The promoter then drives the expression of the endogenous sequence.

[0470] The polynucleotide encoding a polypeptide of the present invention may contain a secretory signal sequence that facilitates secretion of the protein. Typically, the signal sequence is positioned in the coding region of the polynucleotide to be expressed towards or at the 5′ end of the coding region. The signal sequence may be homologous or heterologous, to the ovarian and/or breast cancer antigen polynucleotide of interest and may be homologous or heterologous to the cells to be transfected. Additionally, the signal sequence may be chemically synthesized using methods known in the art.

[0471] Any mode of administration of any of the above-described polynucleotides constructs can be used so long as the mode results in the expression of one or more molecules in an amount sufficient to provide a therapeutic effect. This includes direct needle injection, systemic injection, catheter infusion, biolistic injectors, particle accelerators (i.e., “gene guns”), gelfoam sponge depots, other commercially available depot materials, osmotic pumps (e.g., Alza minipumps), oral or suppositorial solid (tablet or pill) pharmaceutical formulations, and decanting or topical applications during surgery. For example, direct injection of naked calcium phosphate-precipitated plasmid into rat liver and rat spleen or a protein-coated plasmid into the portal vein has resulted in gene expression of the foreign gene in the rat livers (Kaneda et al., Science 243:375 (1989)).

[0472] A preferred method of local administration is by direct injection. Preferably, a recombinant molecule of the present invention complexed with a delivery vehicle is administered by direct injection into or locally within the area of arteries. Administration of a composition locally within the area of arteries refers to injecting the composition centimeters and preferably, millimeters within arteries.

[0473] Another method of local administration is to contact a polynucleotide construct of the present invention in or around a surgical wound. For example, a patient can undergo surgery and the polynucleotide construct can be coated on the surface of tissue inside the wound or the construct can be injected into areas of tissue inside the wound.

[0474] Therapeutic compositions useful in systemic administration, include recombinant molecules of the present invention complexed to a targeted delivery vehicle of the present invention. Suitable delivery vehicles for use with systemic administration comprise liposomes comprising ligands for targeting the vehicle to a particular site. In specific embodiments, suitable delivery vehicles for use with systemic administration comprise liposomes comprising polypeptides of the invention for targeting the vehicle to a particular site.

[0475] Preferred methods of systemic administration, include intravenous injection, aerosol, oral and percutaneous (topical) delivery. Intravenous injections can be performed using methods standard in the art. Aerosol delivery can also be performed using methods standard in the art (see, for example, Stribling et al., Proc. Natl. Acad. Sci. USA 189:11277-11281, 1992, which is incorporated herein by reference). Oral delivery can be performed by complexing a polynucleotide construct of the present invention to a carrier capable of withstanding degradation by digestive enzymes in the gut of an animal. Examples of such carriers, include plastic capsules or tablets, such as those known in the art. Topical delivery can be performed by mixing a polynucleotide construct of the present invention with a lipophilic reagent (e.g., DMSO) that is capable of passing into the skin.

[0476] Determining an effective amount of substance to be delivered can depend upon a number of factors including, for example, the chemical structure and biological activity of the substance, the age and weight of the animal, the precise condition requiring treatment and its severity, and the route of administration. The frequency of treatments depends upon a number of factors, such as the amount of polynucleotide constructs administered per dose, as well as the health and history of the subject. The precise amount, number of doses, and timing of doses will be determined by the attending physician or veterinarian.

[0477] Therapeutic compositions of the present invention can be administered to any animal, preferably to mammals and birds. Preferred mammals include humans, dogs, cats, mice, rats, rabbits sheep, cattle, horses and pigs, with humans being particularly preferred.

[0478] Biological Activities

[0479] Polynucleotides or polypeptides, or agonists or antagonists of the present invention, can be used in assays to test for one or more biological activities. If these polynucleotides or polypeptides, or agonists or antagonists of the present invention, do exhibit activity in a particular assay, it is likely that these molecules may be involved in the diseases associated with the biological activity. Thus, the polynucleotides and polypeptides, and agonists or antagonists could be used to treat, prevent diagnose and/or prognose the associated disease.

[0480] The ovarian and/or breast cancer antigen polynucleotides and polypeptides of the invention are predicted to have predominant expression in ovarian and/or breast cancer tissues.

[0481] Thus, the ovarian and/or breast cancer antigens of the invention may be useful as therapeutic molecules. Each would be useful for diagnosis, detection, treatment and/or prevention of diseases or disorders of the ovaries and/or breast, including, but not limited to, cancers of the ovaries, such as primary and secondary cancerous growth, endometrioid carcinoma of the ovary, ovarian papillary serous adenocarcinoma, ovarian mucinous adenocarcinoma, and ovarian Krukenberg tumors; and cancers of the breast, such as in situ carcinomas (e.g., ductal carcinoma in situ, Paget's disease, and lobular carcinoma in situ), invasive carcinomas (e.g., invasive ductal carcinoma, invasive lobular carcinoma, medullary carcinoma, colloid (mucinous) carcinoma, tubular carcinoma, and invasive papillary carcinoma), and fibroadenoma, pipillary carcinoma, secretory carcinoma, and apocrine carcinoma; and/or as described under “Hyperproliferative Disorders” and “Reproductive System Disorders” below.

[0482] In a preferred embodiment, polynucleotides of the invention (e.g., a nucleic acid sequence of SEQ ID NO:X or the complement thereof; or the cDNA sequence contained in Clone ID NO:Z, or fragments or variants thereof) and/or polypeptides of the invention (e.g., an amino acid sequence contained in SEQ ID NO:Y, an amino acid sequence encoded by SEQ ID NO:X, or the complement threof, an amino acid sequence encoded by the cDNA sequence contained in Clone ID NO:Z and fragments or variants thereof as described herein) are useful for the diagnosis, detection, treatement, and/or prevention of diseases or disorders of the tissues/cells corresponding to the library source disclosed in column 7 of Table 1A expressing the corresponding ovarian and/or breast cancer sequence disclosed in the same row of Table 1A. In certain embodiments, a polypeptide of the invention, or polynucleotides, antibodies, agonists, or antagonists corresponding to that polypeptide, may be used to diagnose and/or prognose diseases and/or disorders associated with the tissue(s) in which the polypeptide of the invention is expressed, including one, two, three, four, five, or more tissues disclosed in Table 1A, column 7 (Tissue Distribution Library Code).

[0483] Particularly, the ovarian and/or breast cancer antigens may be a useful therapeutic for ovarian and/or breast cancer. Treatment, diagnosis, detection, and/or prevention of ovarian and/or breast cancer could be carried out using an ovarian and/or breast cancer antigen or soluble form of an ovarian and/or breast cancer antigen, an ovarian and/or breast cancer antigen ligand, gene therapy, or ex vivo applications. Moreover, inhibitors of a ovarian and/or breast cancer antigen, either blocking antibodies or mutant forms, could modulate the expression of the ovarian and/or breast cancer antigen. These inhibitors may be useful to treat, diagnose, detect, and/or prevent diseases associated with the misregulation of an ovarian and/or breast cancer antigen.

[0484] In one embodiment, the invention provides a method for the specific delivery of compositions of the invention to cells (e.g., normal or diseased ovarian and/or breast cancer cells) by administering polypeptides of the invention (e.g., ovarian and/or breast cancer antigen polypeptides or anti-ovarian and/or breast cancer antigen antibodies) that are associated with heterologous polypeptides or nucleic acids. In one example, the invention provides a method for delivering a therapeutic protein into the targeted cell (e.g., an aberrant ovarian and/or breast cell or ovarian and/or breast cancer cell). In another example, the invention provides a method for delivering a single stranded nucleic acid (e.g., antisense or ribozymes) or double stranded nucleic acid (e.g., DNA that can integrate into the cell's genome or replicate episomally and that can be transcribed) into the targeted cell.

[0485] In another embodiment, the invention provides a method for the specific destruction of cells (e.g., the destruction of aberrant ovarian and/or breast cells, including, but not limited to, ovarian and/or breast tumor cells) by administering polypeptides of the invention (e.g., ovarian and/or breast cancer antigen polypeptides or fragments thereof, or anti-ovarian and/or breast cancer antigen antibodies) in association with toxins or cytotoxic prodrugs.

[0486] By “toxin” is meant compounds that bind and activate endogenous cytotoxic effector systems, radioisotopes, holotoxins, modified toxins, catalytic subunits of toxins, cytotoxins (cytotoxic agents), or any molecules or enzymes not normally present in or on the surface of a cell that under defined conditions cause the cell's death. Toxins that may be used according to the methods of the invention include, but are not limited to, radioisotopes known in the art, compounds such as, for example, antibodies (or complement fixing containing portions thereof) that bind an inherent or induced endogenous cytotoxic effector system, thymidine kinase, endonuclease, RNAse, alpha toxin, ricin, abrin, Pseudomonas exotoxin A, diphtheria toxin, saporin, momordin, gelonin, pokeweed antiviral protein, alpha-sarcin and cholera toxin. “Toxin” also includes a cytostatic or cytocidal agent, a therapeutic agent or a radioactive metal ion, e.g., alpha-emitters such as, for example, ²¹³Bi, or other radioisotopes such as, for example, ¹⁰³Pd, ¹³³Xe, ¹³¹I, ⁶⁸Ge, ⁵⁷Co, ⁶⁵Zn, ⁸⁵Sr, ³²P, ³⁵S, ⁹⁰Y, ¹⁵³Sm, ¹⁵³Gd, ¹⁶⁹Yb, ⁵¹Cr, ⁵⁴Mn, ⁷⁵Se ¹¹³Sn, ⁹⁰Yttrium, ¹¹⁷Tin, ¹⁸⁶Rhenium, ¹⁶⁶Holmium, and ¹⁸⁸Rhenium; luminescent labels, such as luminol; and fluorescent labels, such as fluorescein and rhodamine, and biotin.

[0487] Techniques known in the art may be applied to label antibodies of the invention. Such techniques include, but are not limited to, the use of bifunctional conjugating agents (see e.g., U.S. Pat. Nos. 5,756,065; 5,714,631; 5,696,239; 5,652,361; 5,505,931; 5,489,425; 5,435,990; 5,428,139; 5,342,604; 5,274,119; 4,994,560; and 5,808,003; the contents of each of which are hereby incorporated by reference in its entirety). A cytotoxin or cytotoxic agent includes any agent that is detrimental to cells. Examples include paclitaxot, cytochalasin B, gramicidin D, ethidium bromide, emetine, mitomycin, etoposide, tenoposide, vincristine, vinblastine, colchicin, doxorubicin, daunorubicin, dihydroxy anthracin dione, mitoxantrone, mithramycin, actinomycin D, 1-dehydrotestosterone, glucocorticoids, procaine, tetracaine, lidocaine, propranolol, and puromycin and analogs or homologs thereof. Therapeutic agents include, but are not limited to, antimetabolites (e.g., methotrexate, 6-mercaptopurine, 6-thioguanine, cytarabine, 5-fluorouracil decarbazine), alkylating agents (e.g., mechlorethamine, thioepa chlorambucil, melphalan, carmustine (BSNU) and lomustine (CCNU), cyclothosphamide, busulfan, dibromomannitol, streptozotocin, mitomycin C, and cis-dichlorodiamine platinum (II) (DDP) cisplatin), anthracyclines (e.g., daunorubicin (formerly daunomycin) and doxorubicin), antibiotics (e.g., dactinomycin (formerly actinomycin), bleomycin, mithramycin, and anthramycin (AMC)), and anti-mitotic agents (e.g., vincristine and vinblastine).

[0488] By “cytotoxic prodrug” is meant a non-toxic compound that is converted by an enzyme, normally present in the cell, into a cytotoxic compound. Cytotoxic prodrugs that may be used according to the methods of the invention include, but are not limited to, glutamyl derivatives of benzoic acid mustard alkylating agent, phosphate derivatives of etoposide or mitomycin C, cytosine arabinoside, daunorubisin, and phenoxyacetamide derivatives of doxorubicin.

[0489] It will be appreciated that conditions caused by a decrease in the standard or normal level of an ovarian and/or breast cancer antigen activity in an individual, particularly disorders of the ovaries or breast, can be treated by administration of an ovarian and/or breast cancer antigen polypeptide (e.g., such as, for example, the complete ovarian and/or breast cancer antigen polypeptide, the soluble form of the extracellular domain of an ovarian and/or breast cancer antigen polypeptide, or cells expressing the complete protein) or agonist. Thus, the invention also provides a method of treatment of an individual in need of an increased level of ovarian and/or breast cancer antigen activity comprising administering to such an individual a pharmaceutical composition comprising an amount of an isolated ovarian and/or breast cancer antigen polypeptide of the invention, or agonist thereof (e.g., an agonistic anti-ovarian and/or breast cancer antigen antibody), effective to increase the ovarian and/or breast cancer antigen activity level in such an individual.

[0490] It will also be appreciated that conditions caused by a increase in the standard or normal level of ovarian and/or breast cancer antigen activity in an individual, particularly disorders of the ovaries and/or breast, can be treated by administration of ovarian and/or breast cancer antigen polypeptides (e.g., such as, for example, the complete ovarian and/or breast cancer antigen polypeptide, the soluble form of the extracellular domain of an ovarian and/or breast cancer antigen polypeptide, or cells expressing the complete protein) or antagonist (e.g., an antagonistic ovarian and/or breast cancer antigen antibody). Thus, the invention also provides a method of treatment of an individual in need of an decreased level of ovarian and/or breast cancer antigen activity comprising administering to such an individual a pharmaceutical composition comprising an amount of an isolated ovarian and/or breast cancer antigen polypeptide of the invention, or antagonist thereof (e.g., an antagonistic anti-ovarian and/or breast cancer antigen antibody), effective to decrease the ovarian and/or breast cancer antigen activity level in such an individual.

[0491] More generally, polynucleotides, translation products and antibodies corresponding to this gene may be useful for the diagnosis, prognosis, prevention, and/or treatment of diseases and/or disorders associated with the following systems.

[0492] Reproductive System Disorders

[0493] The polynucleotides or polypeptides, or agonists or antagonists of the invention may be used for the diagnosis, treatment, or prevention of diseases and/or disorders of the reproductive system. Reproductive system disorders that can be treated by the compositions of the invention, include, but are not limited to, reproductive system injuries, infections, neoplastic disorders, congenital defects, and diseases or disorders which result in infertility, complications with pregnancy, labor, or parturition, and postpartum difficulties.

[0494] Reproductive system disorders and/or diseases include diseases and/or disorders of the testes, including, but not limited to, testicular atrophy, testicular feminization, cryptorchism (unilateral and bilateral), anorchia, ectopic testis, epididymitis and orchitis (typically resulting from infections such as, for example, gonorrhea, mumps, tuberculosis, and syphilis), testicular torsion, vasitis nodosa, germ cell tumors (e.g., seminomas, embryonal cell carcinomas, teratocarcinomas, choriocarcinomas, yolk sac tumors, and teratomas), stromal tumors (e.g., Leydig cell tumors), hydrocele, hematocele, varicocele, spermatocele, inguinal hernia, and disorders of sperm production (e.g., immotile cilia syndrome, aspermia, asthenozoospermia, azoospermia, oligospermia, and teratozoospermia).

[0495] Reproductive system disorders also include, but are not limited to, disorders of the prostate gland, such as acute non-bacterial prostatitis, chronic non-bacterial prostatitis, acute bacterial prostatitis, chronic bacterial prostatitis, prostatodystonia, prostatosis, granulomatous prostatitis, malacoplakia, benign prostatic hypertrophy or hyperplasia, and prostate neoplastic disorders, including adenocarcinomas, transitional cell carcinomas, ductal carcinomas, and squamous cell carcinomas.

[0496] Additionally, the compositions of the invention may be useful in the diagnosis, treatment, and/or prevention of disorders or diseases of the penis and urethra, including, but not limited to, inflammatory disorders, such as balanoposthitis, balanitis xerotica obliterans, phimosis, paraphimosis, syphilis, herpes simplex virus, gonorrhea, non-gonococcal urethritis, chlamydia, mycoplasma, trichomonas, HIV, AIDS, Reiter's syndrome, condyloma acuminatum, condyloma latum, and pearly penile papules; urethral abnormalities, such as hypospadias, epispadias, and phimosis; premalignant lesions, including Erythroplasia of Queyrat, Bowen's disease, Bowenoid paplosis, giant condyloma of Buscke-Lowenstein, and varrucous carcinoma; penile cancers, including squamous cell carcinomas, carcinoma in situ, verrucous carcinoma, and disseminated penile carcinoma; urethral neoplastic disorders, including penile urethral carcinoma, bulbomembranous urethral carcinoma, and prostatic urethral carcinoma; and erectile disorders, such as priapism, Peyronie's disease, erectile dysfunction, and impotence.

[0497] Moreover, diseases and/or disorders of the vas deferens include, but are not limited to, vasculititis and CBAVD (congenital bilateral absence of the vas deferens); additionally, the polynucleotides, polypeptides, and agonists or antagonists of the present invention may be used in the diagnosis, treatment, and/or prevention of diseases and/or disorders of the seminal vesicles, including but not limited to, hydatid disease, congenital chloride diarrhea, and polycystic kidney disease.

[0498] Other disorders and/or diseases of the male reproductive system that may be diagnosed, treated, and/or prevented with the compositions of the invention include, but are not limited to, Klinefelter's syndrome, Young's syndrome, premature ejaculation, diabetes mellitus, cystic fibrosis, Kartagener's syndrome, high fever, multiple sclerosis, and gynecomastia.

[0499] Further, the polynucleotides, polypeptides, and agonists or antagonists of the present invention may be used in the diagnosis, treatment, and/or prevention of diseases and/or disorders of the vagina and vulva, including, but not limited to, bacterial vaginosis, candida vaginitis, herpes simplex virus, chancroid, granuloma inguinale, lymphogranuloma venereum, scabies, human papillomavirus, vaginal trauma, vulvar trauma, adenosis, chlamydia vaginitis, gonorrhea, trichomonas vaginitis, condyloma acuminatum, syphilis, molluscum contagiosum, atrophic vaginitis, Paget's disease, lichen sclerosus, lichen planus, vulvodynia, toxic shock syndrome, vaginismus, vulvovaginitis, vulvar vestibulitis, and neoplastic disorders, such as squamous cell hyperplasia, clear cell carcinoma, basal cell carcinoma, melanomas, cancer of Bartholin's gland, and vulvar intraepithelial neoplasia.

[0500] Disorders and/or diseases of the uterus that may be diagnosed, treated, and/or prevented with the compositions of the invention include, but are not limited to, dysmenorrhea, retroverted uterus, endometriosis, fibroids, adenomyosis, anovulatory bleeding, amenorrhea, Cushing's syndrome, hydatidiform moles, Asherman's syndrome, premature menopause, precocious puberty, uterine polyps, dysfunctional uterine bleeding (e.g., due to aberrant hormonal signals), and neoplastic disorders, such as adenocarcinomas, keiomyosarcomas, and sarcomas. Additionally, the polypeptides, polynucleotides, or agonists or antagonists of the invention may be useful as a marker or detector of, as well as in the diagnosis, treatment, and/or prevention of congenital uterine abnormalities, such as bicornuate uterus, septate uterus, simple unicomuate uterus, unicornuate uterus with a noncavitary rudimentary horn, unicornuate uterus with a non-communicating cavitary rudimentary horn, unicornuate uterus with a communicating cavitary horn, arcuate uterus, uterine didelfus, and T-shaped uterus.

[0501] Ovarian diseases and/or disorders that may be diagnosed, treated, and/or prevented with the compositions of the invention include, but are not limited to, anovulation, polycystic ovary syndrome (Stein-Leventhal syndrome), ovarian cysts, ovarian hypofunction, ovarian insensitivity to gonadotropins, ovarian overproduction of androgens, right ovarian vein syndrome, amenorrhea, hirutism, and ovarian cancer (including, but not limited to, primary and secondary cancerous growth, Sertoli-Leydig tumors, endometriod carcinoma of the ovary, ovarian papillary serous adenocarcinoma, ovarian mucinous adenocarcinoma, and Ovarian Krukenberg tumors).

[0502] Cervical diseases and/or disorders that may be diagnosed, treated, and/or prevented with the compositions of the invention include, but are not limited to, cervicitis, chronic cervicitis, mucopurulent cervicitis, cervical dysplasia, cervical polyps, Nabothian cysts, cervical erosion, cervical incompetence, and cervical neoplasms (including, for example, cervical carcinoma, squamous metaplasia, squamous cell carcinoma, adenosquamous cell neoplasia, and columnar cell neoplasia).

[0503] Additionally, diseases and/or disorders of the reproductive system that may be diagnosed, treated, and/or prevented with the compositions of the invention include, but are not limited to, disorders and/or diseases of pregnancy, including miscarriage and stillbirth, such as early abortion, late abortion, spontaneous abortion, induced abortion, therapeutic abortion, threatened abortion, missed abortion, incomplete abortion, complete abortion, habitual abortion, missed abortion, and septic abortion; ectopic pregnancy, anemia, Rh incompatibility, vaginal bleeding during pregnancy, gestational diabetes, intrauterine growth retardation, polyhydramnios, HELLP syndrome, abruptio placentae, placenta previa, hyperemesis, preeclampsia, eclampsia, herpes gestationis, and urticaria of pregnancy. Additionally, the polynucleotides, polypeptides, and agonists or antagonists of the present invention may be used in the diagnosis, treatment, and/or prevention of diseases that can complicate pregnancy, including heart disease, heart failure, rheumatic heart disease, congenital heart disease, mitral valve prolapse, high blood pressure, anemia, kidney disease, infectious disease (e.g., rubella, cytomegalovirus, toxoplasmosis, infectious hepatitis, chlamydia, HIV, AIDS, and genital herpes), diabetes mellitus, Graves' disease, thyroiditis, hypothyroidism, Hashimoto's thyroiditis, chronic active hepatitis, cirrhosis of the liver, primary biliary cirrhosis, asthma, systemic lupus eryematosis, rheumatoid arthritis, myasthenia gravis, idiopathic thrombocytopenic purpura, appendicitis, ovarian cysts, gallbladder disorders, and obstruction of the intestine.

[0504] Complications associated with labor and parturition that may be diagnosed, treated, and/or prevented with the compositions of the invention include, but are not limited to, premature rupture of the membranes, pre-term labor, post-term pregnancy, postmaturity, labor that progresses too slowly, fetal distress (e.g., abnormal heart rate (fetal or maternal), breathing problems, and abnormal fetal position), shoulder dystocia, prolapsed umbilical cord, amniotic fluid embolism, and aberrant uterine bleeding.

[0505] Further, diseases and/or disorders of the postdelivery period, that may be diagnosed, treated, and/or prevented with the compositions of the invention, include, but are not limited to, endometritis, myometritis, parametritis, peritonitis, pelvic thrombophlebitis, pulmonary embolism, endotoxemia, pyelonephritis, saphenous thrombophlebitis, mastitis, cystitis, postpartum hemorrhage, and inverted uterus.

[0506] Other disorders and/or diseases of the female reproductive system that may be diagnosed, treated, and/or prevented by the polynucleotides, polypeptides, and agonists or antagonists of the present invention include, but are not limited to, Turner's syndrome, pseudohermaphroditism, premenstrual syndrome, pelvic inflammatory disease, pelvic congestion (vascular engorgement), frigidity, anorgasmia, dyspareunia, ruptured fallopian tube, and Mittelschmerz.

[0507] Immune Activity

[0508] Polynucleotides, polypeptides, antibodies, and/or agonists or antagonists of the present invention may be useful in treating, preventing, diagnosing and/or prognosing diseases, disorders, and/or conditions of the immune system, by, for example, activating or inhibiting the proliferation, differentiation, or mobilization (chemotaxis) of immune cells. Immune cells develop through a process called hematopoiesis, producing myeloid (platelets, red blood cells, neutrophils, and macrophages) and lymphoid (B and T lymphocytes) cells from pluripotent stem cells. The etiology of these immune diseases, disorders, and/or conditions may be genetic, somatic, such as cancer and some autoimmune diseases, acquired (e.g., by chemotherapy or toxins), or infectious. Moreover, polynucleotides, polypeptides, antibodies, and/or agonists or antagonists of the present invention can be used as a marker or detector of a particular immune system disease or disorder.

[0509] In another embodiment, a polypeptide of the invention, or polynucleotides, antibodies, agonists, or antagonists corresponding to that polypeptide, may be used to treat diseases and disorders of the immune system and/or to inhibit or enhance an immune response generated by cells associated with the tissue(s) in which the polypeptide of the invention is expressed, including one, two, three, four, five, or more tissues disclosed in Table 1A, column 7 (Tissue Distribution Library Code).

[0510] Polynucleotides, polypeptides, antibodies, and/or agonists or antagonists of the present invention may be useful in treating, preventing, diagnosing, and/or prognosing immunodeficiencies, including both congenital and acquired immunodeficiencies. Examples of B cell immunodeficiencies in which immunoglobulin levels B cell function and/or B cell numbers are decreased include: X-linked agammaglobulinemia (Bruton's disease), X-linked infantile agammaglobulinemia, X-linked immunodeficiency with hyper IgM, non X-linked immunodeficiency with hyper IgM, X-linked lymphoproliferative syndrome (XLP), agammaglobulinemia including congenital and acquired agammaglobulinemia, adult onset agammaglobulinemia, late-onset agammaglobulinemia, dysgammaglobulinemia, hypogammaglobulinemia, unspecified hypogammaglobulinemia, recessive agammaglobulinemia (Swiss type), Selective IgM deficiency, selective IgA deficiency, selective IgG subclass deficiencies, IgG subclass deficiency (with or without IgA deficiency), Ig deficiency with increased IgM, IgG and IgA deficiency with increased IgM, antibody deficiency with normal or elevated Igs, Ig heavy chain deletions, kappa chain deficiency, B cell lymphoproliferative disorder (BLPD), common variable immunodeficiency (CVID), common variable immunodeficiency (CVI) (acquired), and transient hypogammaglobulinemia of infancy.

[0511] In specific embodiments, ataxia-telangiectasia or conditions associated with ataxia-telangiectasia are treated, prevented, diagnosed, and/or prognosing using the polypeptides or polynucleotides of the invention, and/or agonists or antagonists thereof.

[0512] Examples of congenital immunodeficiencies in which T cell and/or B cell function and/or number is decreased include, but are not limited to: DiGeorge anomaly, severe combined immunodeficiencies (SCID) (including, but not limited to, X-linked SCID, autosomal recessive SCID, adenosine deaminase deficiency, purine nucleoside phosphorylase (PNP) deficiency, Class II MHC deficiency (Bare lymphocyte syndrome), Wiskott-Aldrich syndrome, and ataxia telangiectasia), thymic hypoplasia, third and fourth pharyngeal pouch syndrome, 22q11.2 deletion, chronic mucocutaneous candidiasis, natural killer cell deficiency (NK), idiopathic CD4+ T-lymphocytopenia, immunodeficiency with predominant T cell defect (unspecified), and unspecified immunodeficiency of cell mediated immunity.

[0513] In specific embodiments, DiGeorge anomaly or conditions associated with DiGeorge anomaly are treated, prevented, diagnosed, and/or, prognosed using polypeptides or polynucleotides of the invention, or antagonists or agonists thereof.

[0514] Other immunodeficiencies that may be treated, prevented, diagnosed, and/or prognosed using polypeptides or polynucleotides of the invention, and/or agonists or antagonists thereof, include, but are not limited to, chronic granulomatous disease, Chédiak-Higashi syndrome, myeloperoxidase deficiency, leukocyte glucose-6-phosphate dehydrogenase deficiency, X-linked lymphoproliferative syndrome (XLP), leukocyte adhesion deficiency, complement component deficiencies (including C1, C2, C3, C4, C5, C6, C7, C8 and/or C9 deficiencies), reticular dysgenesis, thymic alymphoplasia-aplasia, immunodeficiency with thymoma, severe congenital leukopenia, dysplasia with immunodeficiency, neonatal neutropenia, short limbed dwarfism, and Nezelof syndrome-combined immunodeficiency with Igs.

[0515] In a preferred embodiment, the immunodeficiencies and/or conditions associated with the immunodeficiencies recited above are treated, prevented, diagnosed and/or prognosed using polynucleotides, polypeptides, antibodies, and/or agonists or antagonists of the present invention.

[0516] In a preferred embodiment polynucleotides, polypeptides, antibodies, and/or agonists or antagonists of the present invention could be used as an agent to boost immunoresponsiveness among immunodeficient individuals. In specific embodiments, polynucleotides, polypeptides, antibodies, and/or agonists or antagonists of the present invention could be used as an agent to boost immunoresponsiveness among B cell and/or T cell immunodeficient individuals.

[0517] The polynucleotides, polypeptides, antibodies, and/or agonists or agonists of the present invention may be useful in treating, preventing, diagnosing and/or prognosing autoimmune disorders. Many autoimmune disorders result from inappropriate recognition of self as foreign material by immune cells. This inappropriate recognition results in an immune response leading to the destruction of the host tissue. Therefore, the administration of polynucleotides and polypeptides of the invention that can inhibit an immune response, particularly the proliferation, differentiation, or chemotaxis of T-cells, may be an effective therapy in preventing autoimmune disorders.

[0518] Autoimmune diseases or disorders that may be treated, prevented, diagnosed and/or prognosed by polynucleotides, polypeptides, antibodies, and/or agonists or antagonists of the present invention include, but are not limited to, one or more of the following: systemic lupus erythematosus, rheumatoid arthritis, ankylosing spondylitis, multiple sclerosis, autoimmune thyroiditis, Hashimoto's thyroiditis, autoimmune hemolytic anemia, hemolytic anemia, thrombocytopenia, autoimmune thrombocytopenia purpura, autoimmune neonatal thrombocytopenia, idiopathic thrombocytopenia purpura, purpura (e.g., Henloch-Scoenlein purpura), autoimmunocytopenia, Goodpasture's syndrome, Pemphigus vulgaris, myasthenia gravis, Grave's disease (hyperthyroidism), and insulin-resistant diabetes mellitus.

[0519] Additional disorders that are likely to have an autoimmune component that may be treated, prevented, and/or diagnosed with the compositions of the invention include, but are not limited to, type II collagen-induced arthritis, antiphospholipid syndrome, dermatitis, allergic encephalomyelitis, myocarditis, relapsing polychondritis, rheumatic heart disease, neuritis, uveitis ophthalmia, polyendocrinopathies, Reiter's Disease, Stiff-Man Syndrome, autoimmune pulmonary inflammation, autism, Guillain-Barre Syndrome, insulin dependent diabetes mellitus, and autoimmune inflammatory eye disorders.

[0520] Additional disorders that are likely to have an autoimmune component that may be treated, prevented, diagnosed and/or prognosed with the compositions of the invention include, but are not limited to, scleroderma with anti-collagen antibodies (often characterized, e.g., by nucleolar and other nuclear antibodies), mixed connective tissue disease (often characterized, e.g., by antibodies to extractable nuclear antigens (e.g., ribonucleoprotein)), polymyositis (often characterized, e.g., by nonhistone ANA), pernicious anemia (often characterized, e.g., by antiparietal cell, microsomes, and intrinsic factor antibodies), idiopathic Addison's disease (often characterized, e.g., by humoral and cell-mediated adrenal cytotoxicity, infertility (often characterized, e.g., by antispermatozoal antibodies), glomerulonephritis (often characterized, e.g., by glomerular basement membrane antibodies or immune complexes), bullous pemphigoid (often characterized, e.g., by IgG and complement in basement membrane), Sjogren's syndrome (often characterized, e.g., by multiple tissue antibodies, and/or a specific nonhistone ANA (SS-B)), diabetes mellitus (often characterized, e.g., by cell-mediated and humoral islet cell antibodies), and adrenergic drug resistance (including adrenergic drug resistance with asthma or cystic fibrosis) (often characterized, e.g., by beta-adrenergic receptor antibodies).

[0521] Additional disorders that may have an autoimmune component that may be treated, prevented, diagnosed and/or prognosed with the compositions of the invention include, but are not limited to, chronic active hepatitis (often characterized, e.g., by smooth muscle antibodies), primary biliary cirrhosis (often characterized, e.g., by mitochondria antibodies), other endocrine gland failure (often characterized, e.g., by specific tissue antibodies in some cases), vitiligo (often characterized, e.g., by melanocyte antibodies), vasculitis (often characterized, e.g., by Ig and complement in vessel walls and/or low serum complement), post-MI (often characterized, e.g., by myocardial antibodies), cardiotomy syndrome (often characterized, e.g., by myocardial antibodies), urticaria (often characterized, e.g., by IgG and IgM antibodies to IgE), atopic dermatitis (often characterized, e.g., by IgG and IgM antibodies to IgE), asthma (often characterized, e.g., by IgG and IgM antibodies to IgE), and many other inflammatory, granulomatous, degenerative, and atrophic disorders.

[0522] In a preferred embodiment, the autoimmune diseases and disorders and/or conditions associated with the diseases and disorders recited above are treated, prevented, diagnosed and/or prognosed using for example, antagonists or agonists, polypeptides or polynucleotides, or antibodies of the present invention. In a specific preferred embodiment, rheumatoid arthritis is treated, prevented, and/or diagnosed using polynucleotides, polypeptides, antibodies, and/or agonists or antagonists of the present invention.

[0523] In another specific preferred embodiment, systemic lupus erythematosus is treated, prevented, and/or diagnosed using polynucleotides, polypeptides, antibodies, and/or agonists or antagonists of the present invention. In another specific preferred embodiment, idiopathic thrombocytopenia purpura is treated, prevented, and/or diagnosed using polynucleotides, polypeptides, antibodies, and/or agonists or antagonists of the present invention.

[0524] In another specific preferred embodiment IgA nephropathy is treated, prevented, and/or diagnosed using polynucleotides, polypeptides, antibodies, and/or agonists or antagonists of the present invention.

[0525] In a preferred embodiment, the autoimmune diseases and disorders and/or conditions associated with the diseases and disorders recited above are treated, prevented, diagnosed and/or prognosed using polynucleotides, polypeptides, antibodies, and/or agonists or antagonists of the present invention.

[0526] In preferred embodiments, polypeptides, antibodies, polynucleotides and/or agonists or antagonists of the present invention are used as a immunosuppressive agent(s).

[0527] Polynucleotides, polypeptides, antibodies, and/or agonists or antagonists of the present invention may be useful in treating, preventing, prognosing, and/or diagnosing diseases, disorders, and/or conditions of hematopoietic cells. Polynucleotides, polypeptides, antibodies, and/or agonists or antagonists of the present invention could be used to increase differentiation and proliferation of hematopoietic cells, including the pluripotent stem cells, in an effort to treat or prevent those diseases, disorders, and/or conditions associated with a decrease in certain (or many) types hematopoietic cells, including but not limited to, leukopenia, neutropenia, anemia, and thrombocytopenia. Alternatively, Polynucleotides, polypeptides, antibodies, and/or agonists or antagonists of the present invention could be used to increase differentiation and proliferation of hematopoietic cells, including the pluripotent stem cells, in an effort to treat or prevent those diseases, disorders, and/or conditions associated with an increase in certain (or many) types of hematopoietic cells, including but not limited to, histiocytosis.

[0528] Allergic reactions and conditions, such as asthma (particularly allergic asthma) or other respiratory problems, may also be treated, prevented, diagnosed and/or prognosed using polypeptides, antibodies, or polynucleotides of the, invention, and/or agonists or antagonists thereof. Moreover, these molecules can be used to treat, prevent, prognose, and/or diagnose anaphylaxis, hypersensitivity to an antigenic molecule, or blood group incompatibility.

[0529] Additionally, polypeptides or polynucleotides of the invention, and/or agonists or antagonists thereof, may be used to treat, prevent, diagnose and/or prognose IgE-mediated allergic reactions. Such allergic reactions include, but are not limited to, asthma, rhinitis, and eczema. In specific embodiments, polynucleotides, polypeptides, antibodies, and/or agonists or antagonists of the present invention may be used to modulate IgE concentrations in vitro or in vivo.

[0530] Moreover, polynucleotides, polypeptides, antibodies, and/or agonists or antagonists of the present invention have uses in the diagnosis, prognosis, prevention, and/or treatment of inflammatory conditions. For example, since polypeptides, antibodies, or polynucleotides of the invention, and/or agonists or antagonists of the invention may inhibit the activation, proliferation and/or differentiation of cells involved in an inflammatory response, these molecules can be used to prevent and/or treat chronic and acute inflammatory conditions. Such inflammatory conditions include, but are not limited to, for example, inflammation associated with infection (e.g., septic shock, sepsis, or systemic inflammatory response syndrome), ischemia-reperfusion injury, endotoxin lethality, complement-mediated hyperacute rejection, nephritis, cytokine or chemokine induced lung injury, inflammatory bowel disease, Crohn's disease, over production of cytokines (e.g., TNF or IL-1.), respiratory disorders (e.g., asthma and allergy); gastrointestinal disorders (e.g., inflammatory bowel disease); cancers (e.g., gastric, ovarian, lung, bladder, liver, and breast); CNS disorders (e.g., multiple sclerosis; ischemic brain injury and/or stroke, traumatic brain injury, neurodegenerative disorders (e.g., Parkinson's disease and Alzheimer's disease); AIDS-related dementia; and prion disease); cardiovascular disorders (e.g., atherosclerosis, myocarditis, cardiovascular disease, and cardiopulmonary bypass complications); as well as many additional diseases, conditions, and disorders that are characterized by inflammation (e.g., hepatitis, rheumatoid arthritis, gout, trauma, pancreatitis, sarcoidosis, dermatitis, renal ischemia-reperfusion injury, Grave's disease, systemic lupus erythematosus, diabetes mellitus, and allogenic transplant rejection).

[0531] Because inflammation is a fundamental defense mechanism, inflammatory disorders can effect virtually any tissue of the body. Accordingly, polynucleotides, polypeptides, and antibodies of the invention, as well as agonists or antagonists thereof, have uses in the treatment of tissue-specific inflammatory disorders, including, but not limited to, adrenalitis, alveolitis, angiocholecystitis, appendicitis, balanitis, blepharitis, bronchitis, bursitis, carditis, cellulitis, cervicitis, cholecystitis, chorditis, cochlitis, colitis, conjunctivitis, cystitis, dermatitis, diverticulitis, encephalitis, endocarditis, esophagitis, eustachitis, fibrositis, folliculitis, gastritis, gastroenteritis, gingivitis, glossitis, hepatosplenitis, keratitis, labyrinthitis, laryngitis, lymphangitis, mastitis, media otitis, meningitis, metritis, mucitis, myocarditis, myosititis, myringitis, nephritis, neuritis, orchitis, osteochondritis, otitis, pericarditis, peritendonitis, peritonitis, pharyngitis, phlebitis, poliomyelitis, prostatitis, pulpitis, retinitis, rhinitis, salpingitis, scleritis, sclerochoroiditis, scrotitis, sinusitis, spondylitis, steatitis, stomatitis, synovitis, syringitis, tendonitis, tonsillitis, urethritis, and vaginitis.

[0532] In specific embodiments, polypeptides, antibodies, or polynucleotides of the invention, and/or agonists or antagonists thereof, are useful to diagnose, prognose, prevent, and/or treat organ transplant rejections and graft-versus-host disease. Organ rejection occurs by host immune cell destruction of the transplanted tissue through an immune response. Similarly, an immune response is also involved in GVHD, but, in this case, the foreign transplanted immune cells destroy the host tissues. Polypeptides, antibodies, or polynucleotides of the invention, and/or agonists or antagonists thereof, that inhibit an immune response, particularly the activation, proliferation, differentiation, or chemotaxis of T-cells, may be an effective therapy in preventing organ rejection or GVHD. In specific embodiments, polypeptides, antibodies, or polynucleotides of the invention, and/or agonists or antagonists thereof, that inhibit an immune response, particularly the activation, proliferation, differentiation, or chemotaxis of T-cells, may be an effective therapy in preventing experimental allergic and hyperacute xenograft rejection.

[0533] In other embodiments, polypeptides, antibodies, or polynucleotides of the invention, and/or agonists or antagonists thereof, are useful to diagnose, prognose, prevent, and/or treat immune complex diseases, including, but not limited to, serum sickness, post streptococcal glomerulonephritis, polyarteritis nodosa, and immune complex-induced vasculitis.

[0534] Polypeptides, antibodies, polynucleotides and/or agonists or antagonists of the invention can be used to treat, detect, and/or prevent infectious agents. For example, by increasing the immune response, particularly increasing the proliferation activation and/or differentiation of B and/or T cells, infectious diseases may be treated, detected, and/or prevented. The immune response may be increased by either enhancing an existing immune response, or by initiating a new immune response. Alternatively, polynucleotides, polypeptides, antibodies, and/or agonists or antagonists of the present invention may also directly inhibit the infectious agent (refer to section of application listing infectious agents, etc), without necessarily eliciting an immune response.

[0535] In another embodiment, polypeptides, antibodies, polynucleotides and/or agonists or antagonists of the present invention are used as a vaccine adjuvant that enhances immune responsiveness to an antigen. In a specific embodiment, polypeptides, antibodies, polynucleotides and/or agonists or antagonists of the present invention are used as an adjuvant to enhance tumor-specific immune responses.

[0536] In another specific embodiment, polypeptides, antibodies, polynucleotides and/or agonists or antagonists of the present invention are used as an adjuvant to enhance anti-viral immune responses. Anti-viral immune responses that may be enhanced using the compositions of the invention as an adjuvant, include virus and virus associated diseases or symptoms described herein or otherwise known in the art. In specific embodiments, the compositions of the invention are used as an adjuvant to enhance an immune response to a virus, disease, or symptom selected from the group consisting of: AIDS, meningitis, Dengue, EBV, and hepatitis (e.g., hepatitis B). In another specific embodiment, the compositions of the invention are used as an adjuvant to enhance an immune response to a virus, disease, or symptom selected from the group consisting of: HIV/AIDS, respiratory syncytial virus, Dengue, rotavirus, Japanese B encephalitis, influenza A and B, parainfluenza, measles, cytomegalovirus, rabies, Junin, Chikungunya, Rift Valley Fever, herpes simplex, and yellow fever.

[0537] In another specific embodiment, polypeptides, antibodies, polynucleotides and/or agonists or antagonists of the present invention are used as an adjuvant to enhance anti-bacterial or anti-fungal immune responses. Anti-bacterial or anti-fungal immune responses that may be enhanced using the compositions of the invention as an adjuvant, include bacteria or fungus and bacteria or fungus associated diseases or symptoms described herein or otherwise known in the art. In specific embodiments, the compositions of the invention are used as an adjuvant to enhance an immune response to a bacteria or fungus, disease, or symptom selected from the group consisting of: tetanus, Diphtheria, botulism, and meningitis type B.

[0538] In another specific embodiment, the compositions of the invention are used as an adjuvant to enhance an immune response to a bacteria or fungus, disease, or symptom selected from the group consisting of: Vibrio cholerae, Mycobacterium leprae, Salmonella typhi, Salmonella paratyphi, Meisseria meningitidis, Streptococcus pneumoniae, Group B streptococcus, Shigella spp., Enterotoxigenic Escherichia coli, Enterohemorrhagic E. coli, and Borrelia burgdorferi.

[0539] In another specific embodiment, polypeptides, antibodies, polynucleotides and/or agonists or antagonists of the present invention are used as an adjuvant to enhance anti-parasitic immune responses. Anti-parasitic immune responses that may be enhanced using the compositions of the invention as an adjuvant, include parasite and parasite associated diseases or symptoms described herein or otherwise known in the art. In specific embodiments, the compositions of the invention are used as an adjuvant to enhance an immune response to a parasite. In another specific embodiment, the compositions of the invention are used as an adjuvant to enhance an immune response to Plasmodium (malaria) or Leishmania.

[0540] In another specific embodiment, polypeptides, antibodies, polynucleotides and/or agonists or antagonists of the present invention may also be employed to treat infectious diseases including silicosis, sarcoidosis, and idiopathic pulmonary fibrosis; for example, by preventing the recruitment and activation of mononuclear phagocytes.

[0541] In another specific embodiment, polypeptides, antibodies, polynucleotides and/or agonists or antagonists of the present invention are used as an antigen for the generation of antibodies to inhibit or enhance immune mediated responses against polypeptides of the invention.

[0542] In one embodiment, polypeptides, antibodies, polynucleotides and/or agonists or antagonists of the present invention are administered to an animal (e.g., mouse, rat, rabbit, hamster, guinea pig, pigs, micro-pig, chicken, camel, goat, horse, cow, sheep, dog, cat, non-human primate, and human, most preferably human) to boost the immune system to produce increased quantities of one or more antibodies (e.g., IgG, IgA, IgM, and IgE), to induce higher affinity antibody production and immunoglobulin class switching (e.g., IgG, IgA, IgM, and IgE), and/or to increase an immune response.

[0543] In another specific embodiment, polypeptides, antibodies, polynucleotides and/or agonists or antagonists of the present invention are used as a stimulator of B cell responsiveness to pathogens.

[0544] In another specific embodiment, polypeptides, antibodies, polynucleotides and/or agonists or antagonists of the present invention are used as an activator of T cells.

[0545] In another specific embodiment, polypeptides, antibodies, polynucleotides and/or agonists or antagonists of the present invention are used as an agent that elevates the immune status of an individual prior to their receipt of immunosuppressive therapies.

[0546] In another specific embodiment, polypeptides, antibodies, polynucleotides and/or agonists or antagonists of the present invention are used as an agent to induce higher affinity antibodies.

[0547] In another specific embodiment, polypeptides, antibodies, polynucleotides and/or agonists or antagonists of the present invention are used as an agent to increase serum immunoglobulin concentrations.

[0548] In another specific embodiment, polypeptides, antibodies, polynucleotides and/or agonists or antagonists of the present invention are used as an agent to accelerate recovery of immunocompromised individuals.

[0549] In another specific embodiment, polypeptides, antibodies, polynucleotides and/or agonists or antagonists of the present invention are used as an agent to boost immunoresponsiveness among aged populations and/or neonates.

[0550] In another specific embodiment, polypeptides, antibodies, polynucleotides and/or agonists or antagonists of the present invention are used as an immune system enhancer prior to, during, or after bone marrow transplant and/or other transplants (e.g., allogeneic or xenogeneic organ transplantation). With respect to transplantation, compositions of the invention may be administered prior to, concomitant with, and/or after transplantation. In a specific embodiment, compositions of the invention are administered after transplantation, prior to the beginning of recovery of T-cell populations. In another specific embodiment, compositions of the invention are first administered after transplantation after the beginning of recovery of T cell populations, but prior to full recovery of B cell populations.

[0551] In another specific embodiment, polypeptides, antibodies, polynucleotides and/or agonists or antagonists of the present invention are used as an agent to boost immunoresponsiveness among individuals having an acquired loss of B cell function. Conditions resulting in an acquired loss of B cell function that may be ameliorated or treated by administering the polypeptides, antibodies, polynucleotides and/or agonists or antagonists thereof, include, but are not limited to, HIV Infection, AIDS, bone marrow transplant, and B cell chronic lymphocytic leukemia (CLL).

[0552] In another specific embodiment, polypeptides, antibodies, polynucleotides and/or agonists or antagonists of the present invention are used as an agent to boost immunoresponsiveness among individuals having a temporary immune deficiency. Conditions resulting in a temporary immune deficiency that may be ameliorated or treated by administering the polypeptides, antibodies, polynucleotides and/or agonists or antagonists thereof, include, but are not limited to, recovery from viral infections (e.g., influenza), conditions associated with malnutrition, recovery from infectious mononucleosis, or conditions associated with stress, recovery from measles, recovery from blood transfusion, and recovery from surgery.

[0553] In another specific embodiment, polypeptides, antibodies, polynucleotides and/or agonists or antagonists of the present invention are used as a regulator of antigen presentation by monocytes, dendritic cells, and/or B-cells. In one embodiment, polynucleotides, polypeptides, antibodies, and/or agonists or antagonists of the present invention enhance antigen presentation or antagonizes antigen presentation in vitro or in vivo. Moreover, in related embodiments, said enhancement or antagonism of antigen presentation may be useful as an anti-tumor treatment or to modulate the immune system.

[0554] In another specific embodiment, polypeptides, antibodies, polynucleotides and/or agonists or antagonists of the present invention are used as an agent to direct an individual's immune system towards development of a humoral response (i.e. TH2) as opposed to a TH1 cellular response.

[0555] In another specific embodiment, polypeptides, antibodies, polynucleotides and/or agonists or antagonists of the present invention are used as a means to induce tumor proliferation and thus make it more susceptible to anti-neoplastic agents. For example, multiple myeloma is a slowly dividing disease and is thus refractory to virtually all anti-neoplastic regimens. If these cells were forced to proliferate more rapidly their susceptibility profile would likely change.

[0556] In another specific embodiment, polypeptides, antibodies, polynucleotides and/or agonists or antagonists of the present invention are used as a stimulator of B cell production in pathologies such as AIDS, chronic lymphocyte disorder and/or Common Variable Immunodificiency.

[0557] In another specific embodiment, polypeptides, antibodies, polynucleotides and/or agonists or antagonists of the present invention are used as a therapy for generation and/or regeneration of lymphoid tissues following surgery, trauma or genetic defect. In another specific embodiment, polypeptides, antibodies, polynucleotides and/or agonists or antagonists of the present invention are used in the pretreatment of bone marrow samples prior to transplant.

[0558] In another specific embodiment, polypeptides, antibodies, polynucleotides and/or agonists or antagonists of the present invention are used as a gene-based therapy for genetically inherited disorders resulting in immuno-incompetence/immunodeficiency such as observed among SCID patients.

[0559] In another specific embodiment, polypeptides, antibodies, polynucleotides and/or agonists or antagonists of the present invention are used as a means of activating monocytes/macrophages to defend against parasitic diseases that effect monocytes such as Leishmania.

[0560] In another specific embodiment, polypeptides, antibodies, polynucleotides and/or agonists or antagonists of the present invention are used as a means of regulating secreted cytokines that are elicited by polypeptides of the invention.

[0561] In another embodiment, polypeptides, antibodies, polynucleotides and/or agonists or antagonists of the present invention are used in one or more of the applications decribed herein, as they may apply to veterinary medicine.

[0562] In another specific embodiment, polypeptides, antibodies, polynucleotides and/or agonists or antagonists of the present invention are used as a means of blocking various aspects of immune responses to foreign agents or self. Examples of diseases or conditions in which blocking of certain aspects of immune responses may be desired include autoimmune disorders such as lupus, and arthritis, as well as immunoresponsiveness to skin allergies, inflammation, bowel disease, injury and diseases/disorders associated with pathogens.

[0563] In another specific embodiment, polypeptides, antibodies, polynucleotides and/or agonists or antagonists of the present invention are used as a therapy for preventing the B cell proliferation and Ig secretion associated with autoimmune diseases such as idiopathic thrombocytopenic purpura, systemic lupus erythematosus and multiple sclerosis.

[0564] In another specific embodiment, polypeptides, antibodies, polynucleotides and/or agonists or antagonists of the present invention are used as a inhibitor of B and/or T cell migration in endothelial cells. This activity disrupts tissue architecture or cognate responses and is useful, for example in disrupting immune responses, and blocking sepsis.

[0565] In another specific embodiment, polypeptides, antibodies, polynucleotides and/or agonists or antagonists of the present invention are used as a therapy for chronic hypergammaglobulinemia evident in such diseases as monoclonal gammopathy of undetermined significance (MGUS), Waldenstrom's disease, related idiopathic monoclonal gammopathies, and plasmacytomas.

[0566] In another specific embodiment, polypeptides, antibodies, polynucleotides and/or agonists or antagonists of the present invention may be employed for instance to inhibit polypeptide chemotaxis and activation of macrophages and their precursors, and of neutrophils, basophils, B lymphocytes and some T-cell subsets, e.g., activated and CD8 cytotoxic T cells and natural killer cells, in certain autoimmune and chronic inflammatory and infective diseases. Examples of autoimmune diseases are described herein and include multiple sclerosis, and insulin-dependent diabetes.

[0567] The polypeptides, antibodies, polynucleotides and/or agonists or antagonists of the present invention may also be employed to treat idiopathic hyper-eosinophilic syndrome by, for example, preventing eosinophil production and migration.

[0568] In another specific embodiment, polypeptides, antibodies, polynucleotides and/or agonists or antagonists of the present invention are used to enhance or inhibit complement mediated cell lysis.

[0569] In another specific embodiment, polypeptides, antibodies, polynucleotides and/or agonists or antagonists of the present invention are used to enhance or inhibit antibody dependent cellular cytotoxicity.

[0570] In another specific embodiment, polypeptides, antibodies, polynucleotides and/or agonists or antagonists of the present invention may also be employed for treating atherosclerosis, for example, by preventing monocyte infiltration in the artery wall.

[0571] In another specific embodiment, polypeptides, antibodies, polynucleotides and/or agonists or antagonists of the present invention may be employed to treat adult respiratory distress syndrome (ARDS).

[0572] In another specific embodiment, polypeptides, antibodies, polynucleotides and/or agonists or antagonists of the present invention may be useful for stimulating wound and tissue repair, stimulating angiogenesis, and/or stimulating the repair of vascular or lymphatic diseases or disorders. Additionally, agonists and antagonists of the invention may be used to stimulate the regeneration of mucosal surfaces.

[0573] In a specific embodiment, polynucleotides or polypeptides, and/or agonists thereof are used to diagnose, prognose, treat, and/or prevent a disorder characterized by primary or acquired immunodeficiency, deficient serum immunoglobulin production, recurrent infections, and/or immune system dysfunction. Moreover, polynucleotides or polypeptides, and/or agonists thereof may be used to treat or prevent infections of the joints, bones, skin, and/or parotid glands, blood-borne infections (e.g., sepsis, meningitis, septic arthritis, and/or osteomyelitis), autoimmune diseases (e.g., those disclosed herein), inflammatory disorders, and malignancies, and/or any disease or disorder or condition associated with these infections, diseases, disorders and/or malignancies) including, but not limited to, CVID, other primary immune deficiencies, HIV disease, CLL, recurrent bronchitis, sinusitis, otitis media, conjunctivitis, pneumonia, hepatitis, meningitis, herpes zoster (e.g., severe herpes zoster), and/or pneumocystis carnii. Other diseases and disorders that may be prevented, diagnosed, prognosed, and/or treated with polynucleotides or polypeptides, and/or agonists of the present invention include, but are not limited to, HIV infection, HTLV-BLV infection, lymphopenia, phagocyte bactericidal dysfunction anemia, thrombocytopenia, and hemoglobinuria.

[0574] In another embodiment, polynucleotides, polypeptides, antibodies, and/or agonists or antagonists of the present invention are used to treat, and/or diagnose an individual having common variable immunodeficiency disease (“CVID”; also known as “acquired agammaglobulinemia” and “acquired hypogammaglobulinemia”) or a subset of this disease.

[0575] In a specific embodiment, polynucleotides, polypeptides, antibodies, and/or agonists or antagonists of the present invention may be used to diagnose, prognose, prevent, and/or treat cancers or neoplasms including immune cell or immune tissue-related cancers or neoplasms. Examples of cancers or neoplasms that may be prevented, diagnosed, or treated by polynucleotides, polypeptides, antibodies, and/or agonists or antagonists of the present invention include, but are not limited to, acute myelogenous leukemia, chronic myelogenous leukemia, Hodgkin's disease, non-Hodgkin's lymphoma, acute lymphocytic anemia (ALL) Chronic lymphocyte leukemia, plasmacytomas, multiple myeloma, Burkitt's lymphoma, EBV-transformed diseases, and/or diseases and disorders described in the section entitled “Hyperproliferative Disorders” elsewhere herein.

[0576] In another specific embodiment, polypeptides, antibodies, polynucleotides and/or agonists or antagonists of the present invention are used as a therapy for decreasing cellular proliferation of Large B-cell Lymphomas.

[0577] In another specific embodiment, polypeptides, antibodies, polynucleotides and/or agonists or antagonists of the present invention are used as a means of decreasing the involvement of B cells and Ig associated with Chronic Myelogenous Leukemia.

[0578] In specific embodiments, the compositions of the invention are used as an agent to boost immunoresponsiveness among B cell immunodeficient individuals, such as, for example, an individual who has undergone a partial or complete splenectomy.

[0579] Antagonists of the invention include, for example, binding and/or inhibitory antibodies, antisense nucleic acids, ribozymes or soluble forms of the polypeptides of the present invention (e.g., Fe fusion protein; see, e.g., Example 9). Agonists of the invention include, for example, binding or stimulatory antibodies, and soluble forms of the polypeptides (e.g., Fe fusion proteins; see, e.g., Example 9). Polypeptides, antibodies, polynucleotides and/or agonists or antagonists of the present invention may be employed in a composition with a pharmaceutically acceptable carrier, e.g., as described herein.

[0580] In another embodiment, polypeptides, antibodies, polynucleotides and/or agonists or antagonists of the present invention are administered to an animal (including, but not limited to, those listed above, and also including transgenic animals) incapable of producing functional endogenous antibody molecules or having an otherwise compromised endogenous immune system, but which is capable of producing human immunoglobulin molecules by means of a reconstituted or partially reconstituted immune system from another animal (see, e.g., published PCT Application Nos. WO98/24893, WO/9634096, WO/9633735, and WO/9110741). Administration of polypeptides, antibodies, polynucleotides and/or agonists or antagonists of the present invention to such animals is useful for the generation of monoclonal antibodies against the polypeptides, antibodies, polynucleotides and/or agonists or antagonists of the present invention.

[0581] Blood-Related Disorders

[0582] The polynucleotides, polypeptides, antibodies, and/or agonists or antagonists of the present invention may be used to modulate hemostatic (the stopping of bleeding) or thrombolytic (clot dissolving) activity. For example, by increasing hemostatic or thrombolytic activity, polynucleotides or polypeptides, and/or agonists or antagonists of the present invention could be used to treat or prevent blood coagulation diseases, disorders, and/or conditions (e.g., afibrinogenemia, factor deficiencies, hemophilia), blood platelet diseases, disorders, and/or conditions (e.g., thrombocytopenia), or wounds resulting from trauma, surgery, or other causes. Alternatively, polynucleotides, polypeptides, antibodies, and/or agonists or antagonists of the present invention that can decrease hemostatic or thrombolytic activity could be used to inhibit or dissolve clotting. These molecules could be important in the treatment or prevention of heart attacks (infarction), strokes, or scarring.

[0583] In specific embodiments, the polynucleotides, polypeptides, antibodies, and/or agonists or antagonists of the present invention may be used to prevent, diagnose, prognose, and/or treat thrombosis, arterial thrombosis, venous thrombosis, thromboembolism, pulmonary embolism, atherosclerosis, myocardial infarction, transient ischemic attack, unstable angina. In specific embodiments, the polynucleotides, polypeptides, antibodies, and/or agonists or antagonists of the present invention may be used for the prevention of occulsion of saphenous grafts, for reducing the risk of periprocedural thrombosis as might accompany angioplasty procedures, for reducing the risk of stroke in patients with atrial fibrillation including nonrheumatic atrial fibrillation, for reducing the risk of embolism associated with mechanical heart valves and or mitral valves disease. Other uses for the polynucleotides, polypeptides, antibodies, and/or agonists or antagonists of the present invention, include, but are not limited to, the prevention of occlusions in extrcorporeal devices (e.g., intravascular canulas, vascular access shunts in hemodialysis patients, hemodialysis machines, and cardiopulmonary bypass machines).

[0584] In another embodiment, a polypeptide of the invention, or polynucleotides, antibodies, agonists, or antagonists corresponding to that polypeptide, may be used to prevent, diagnose, prognose, and/or treat diseases and disorders of the blood and/or blood forming organs associated with the tissue(s) in which the polypeptide of the invention is expressed, including one, two, three, four, five, or more tissues disclosed in Table 1A, column 7 (Tissue Distribution Library Code).

[0585] The polynucleotides, polypeptides, antibodies, and/or agonists or antagonists of the present invention may be used to modulate hematopoietic activity (the formation of blood cells). For example, the polynucleotides, polypeptides, antibodies, and/or agonists or antagonists of the present invention may be used to increase the quantity of all or subsets of blood cells, such as, for example, erythrocytes, lymphocytes (B or T cells), myeloid cells (e.g., basophils, eosinophils, neutrophils, mast cells, macrophages) and platelets. The ability to decrease the quantity of blood cells or subsets of blood cells may be useful in the prevention, detection, diagnosis and/or treatment of anemias and leukopenias described below. Alternatively, the polynucleotides, polypeptides, antibodies, and/or agonists or antagonists of the present invention may be used to decrease the quantity of all or subsets of blood cells, such as, for example, erythrocytes, lymphocytes (B or T cells), myeloid cells (e.g., basophils, eosinophils, neutrophils, mast cells, macrophages) and platelets. The ability to decrease the quantity of blood cells or subsets of blood cells may be useful in the prevention, detection, diagnosis and/or treatment of leukocytoses, such as, for example eosinophilia.

[0586] The polynucleotides, polypeptides, antibodies, and/or agonists or antagonists of the present invention may be used to prevent, treat, or diagnose blood dyscrasia.

[0587] Anemias are conditions in which the number of red blood cells or amount of hemoglobin (the protein that carries oxygen) in them is below normal. Anemia may be caused by excessive bleeding, decreased red blood cell production, or increased red blood cell destruction (hemolysis). The polynucleotides, polypeptides, antibodies, and/or agonists or antagonists of the present invention may be useful in treating, preventing, and/or diagnosing anemias. Anemias that may be treated prevented or diagnosed by the polynucleotides, polypeptides, antibodies, and/or agonists or antagonists of the present invention include iron deficiency anemia, hypochromic anemia, microcytic anemia, chlorosis, hereditary siderob;astic anemia, idiopathic acquired sideroblastic anemia, red cell aplasia, megaloblastic anemia (e.g., pernicious anemia, (vitamin B12 deficiency) and folic acid deficiency anemia), aplastic anemia, hemolytic anemias (e.g., autoimmune helolytic anemia, microangiopathic hemolytic anemia, and paroxysmal nocturnal hemoglobinuria). The polynucleotides, polypeptides, antibodies, and/or agonists or antagonists of the present invention may be useful in treating, preventing, and/or diagnosing anemias associated with diseases including but not limited to, anemias associated with systemic lupus erythematosus, cancers, lymphomas, chronic renal disease, and enlarged spleens. The polynucleotides, polypeptides, antibodies, and/or agonists or antagonists of the present invention may be useful in treating, preventing, and/or diagnosing anemias arising from drug treatments such as anemias associated with methyldopa, dapsone, and/or sulfadrugs. Additionally, rhe polynucleotides, polypeptides, antibodies, and/or agonists or antagonists of the present invention may be useful in treating, preventing, and/or diagnosing anemias associated with abnormal red blood cell architecture including but not limited to, hereditary spherocytosis, hereditary elliptocytosis, glucose-6-phosphate dehydrogenase deficiency, and sickle cell anemia.

[0588] The polynucleotides, polypeptides, antibodies, and/or agonists or antagonists of the present invention may be useful in treating, preventing, and/or diagnosing hemoglobin abnormalities, (e.g., those associated with sickle cell anemia, hemoglobin C disease, hemoglobin S-C disease, and hemoglobin E disease). Additionally, the polynucleotides, polypeptides, antibodies, and/or agonists or antagonists of the present invention may be useful in diagnosing, prognosing, preventing, and/or treating thalassemias, including, but not limited to major and minor forms of alpha-thalassemia and beta-thalassemia.

[0589] In another embodiment, the polynucleotides, polypeptides, antibodies, and/or agonists or antagonists of the present invention may be useful in diagnosing, prognosing, preventing, and/or treating bleeding disorders including, but not limited to, thrombocytopenia (e.g., idiopathic thrombocytopenic purpura, and thrombotic thrombocytopenic purpura), Von Willebrand's disease, hereditary platelet disorders (e.g., storage pool disease such as Chediak-Higashi and Hermansky-Pudlak syndromes, thromboxane A2 dysfunction, thromboasthenia, and Bernard-Soulier syndrome), hemolytic-uremic syndrome, hemophelias such as hemophelia A or Factor VII deficiency and Christmas disease or Factor IX deficiency, Hereditary Hemorhhagic Telangiectsia, also known as Rendu-Osler-Weber syndrome, allergic purpura (Henoch Schonlein purpura) and disseminated intravascular coagulation.

[0590] The effect of the polynucleotides, polypeptides, antibodies, and/or agonists or antagonists of the present invention on the clotting time of blood may be monitored using any of the clotting tests known in the art including, but not limited to, whole blood partial thromboplastin time (PTT), the activated partial thromboplastin time (aPTT), the activated clotting time (ACT), the recalcified activated clotting time, or the Lee-White Clotting time.

[0591] Several diseases and a variety of drugs can cause platelet dysfunction. Thus, in a specific embodiment, the polynucleotides, polypeptides, antibodies, and/or agonists or antagonists of the present invention may be useful in diagnosing, prognosing, preventing, and/or treating acquired platelet dysfunction such as platelet dysfunction accompanying kidney failure, leukemia, multiple myeloma, cirrhosis of the liver, and systemic lupus erythematosus as well as platelet dysfunction associated with drug treatments, including treatment with aspirin, ticlopidine, nonsteroidal anti-inflammatory drugs (used for arthritis, pain, and sprains), and penicillin in high doses.

[0592] In another embodiment, the polynucleotides, polypeptides, antibodies, and/or agonists or antagonists of the present invention may be useful in diagnosing, prognosing, preventing, and/or treating diseases and disorders characterized by or associated with increased or decreased numbers of white blood cells. Leukopenia occurs when the number of white blood cells decreases below normal. Leukopenias include, but are not limited to, neutropenia and lymphocytopenia. An increase in the number of white blood cells compared to normal is known as leukocytosis. The body generates increased numbers of white blood cells during infection. Thus, leukocytosis may simply be a normal physiological parameter that reflects infection. Alternatively, leukocytosis may be an indicator of injury or other disease such as cancer. Leokocytoses, include but are not limited to, eosinophilia, and accumulations of macrophages. In specific embodiments, the polynucleotides, polypeptides, antibodies, and/or agonists or antagonists of the present invention may be useful in diagnosing, prognosing, preventing, and/or treating leukopenia. In other specific embodiments, the polynucleotides, polypeptides, antibodies, and/or agonists or antagonists of the present invention may be useful in diagnosing, prognosing, preventing, and/or treating leukocytosis

[0593] Leukopenia may be a generalized decreased in all types of white blood cells, or may be a specific depletion of particular types of white blood cells. Thus, in specific embodiments, the polynucleotides, polypeptides, antibodies, and/or agonists or antagonists of the present invention may be useful in diagnosing, prognosing, preventing, and/or treating decreases in neutrophil numbers, known as neutropenia. Neutropenias that may be diagnosed, prognosed, prevented, and/or treated by the polynucleotides, polypeptides, antibodies, and/or agonists or antagonists of the present invention include, but are not limited to, infantile genetic agranulocytosis, familial neutropenia, cyclic neutropenia, neutropenias resulting from or associated with dietary deficiencies (e.g., vitamin B 12 deficiency or folic acid deficiency), neutropenias resulting from or associated with drug treatments (e.g., antibiotic regimens such as penicillin treatment, sulfonamide treatment, anticoagulant treatment, anticonvulsant drugs, anti-thyroid drugs, and cancer chemotherapy), and neutropenias resulting from increased neutrophil destruction that may occur in association with some bacterial or viral infections, allergic disorders, autoimmune diseases, conditions in which an individual has an enlarged spleen (e.g., Felty syndrome, malaria and sarcoidosis), and some drug treatment regimens.

[0594] The polynucleotides, polypeptides, antibodies, and/or agonists or antagonists of the present invention may be useful in diagnosing, prognosing, preventing, and/or treating lymphocytopenias (decreased numbers of B and/or T lymphocytes), including, but not limited lymphocytopenias resulting from or associated with stress, drug treatments (e.g., drug treatment with corticosteroids, cancer chemotherapies, and/or radiation therapies), AIDS infection and/or other diseases such as, for example, cancer, rheumatoid arthritis, systemic lupus erythematosus, chronic infections, some viral infections and/or hereditary disorders (e.g., DiGeorge syndrome, Wiskott-Aldrich Syndome, severe combined immunodeficiency, ataxia telangiectsia).

[0595] The polynucleotides, polypeptides, antibodies, and/or agonists or antagonists of the present invention may be useful in diagnosing, prognosing, preventing, and/or treating diseases and disorders associated with macrophage numbers and/or macrophage function including, but not limited to, Gaucher's disease, Niemann-Pick disease, Letterer-Siwe disease and Hand-Schuller-Christian disease.

[0596] In another embodiment, the polynucleotides, polypeptides, antibodies, and/or agonists or antagonists of the present invention may be useful in diagnosing, prognosing, preventing, and/or treating diseases and disorders associated with eosinophil numbers and/or eosinophil function including, but not limited to, idiopathic hypereosinophilic syndrome, eosinophilia-myalgia syndrome, and Hand-Schuller-Christian disease.

[0597] In yet another embodiment, the polynucleotides, polypeptides, antibodies, and/or agonists or antagonists of the present invention may be useful in diagnosing, prognosing, preventing, and/or treating leukemias and lymphomas including, but not limited to, acute lymphocytic (lymphpblastic) leukemia (ALL), acute myeloid (myelocytic, myelogenous, myeloblastic, or myelomonocytic) leukemia, chronic lymphocytic leukemia (e.g., B cell leukemias, T cell leukemias, Sezary syndrome, and Hairy cell leukenia), chronic myelocytic (myeloid, myelogenous, or granulocytic) leukemia, Hodgkin's lymphoma, non-hodgkin's lymphoma, Burkitt's lymphoma, and mycosis fungoides.

[0598] In other embodiments, the polynucleotides, polypeptides, antibodies, and/or agonists or antagonists of the present invention may be useful in diagnosing, prognosing, preventing, and/or treating diseases and disorders of plasma cells including, but not limited to, plasma cell dyscrasias, monoclonal gammaopathies, monoclonal gammopathies of undetermined significance, multiple myeloma, macroglobulinemia, Waldenstrom's macroglobulinemia, cryoglobulinemia, and Raynaud's phenomenon.

[0599] In other embodiments, the polynucleotides, polypeptides, antibodies, and/or agonists or antagonists of the present invention may be useful in treating, preventing, and/or diagnosing myeloproliferative disorders, including but not limited to, polycythemia vera, relative polycythemia, secondary polycythemia, myelofibrosis, acute myelofibrosis, agnogenic myelod metaplasia, thrombocythemia, (including both primary and seconday thrombocythemia) and chronic myelocytic leukemia.

[0600] In other embodiments, the polynucleotides, polypeptides, antibodies, and/or agonists or antagonists of the present invention may be useful as a treatment prior to surgery, to increase blood cell production.

[0601] In other embodiments, the polynucleotides, polypeptides, antibodies, and/or agonists or antagonists of the present invention may be useful as an agent to enhance the migration, phagocytosis, superoxide production, antibody dependent cellular cytotoxicity of neutrophils, eosionophils and macrophages.

[0602] In other embodiments, the polynucleotides, polypeptides, antibodies, and/or agonists or antagonists of the present invention may be useful as an agent to increase the number of stem cells in circulation prior to stem cells pheresis. In another specific embodiment, the polynucleotides, polypeptides, antibodies, and/or agonists or antagonists of the present invention may be useful as an agent to increase the number of stem cells in circulation prior to platelet pheresis.

[0603] In other embodiments, the polynucleotides, polypeptides, antibodies, and/or agonists or antagonists of the present invention may be useful as an agent to increase cytokine production.

[0604] In other embodiments, the polynucleotides, polypeptides, antibodies, and/or agonists or antagonists of the present invention may be useful in preventing, diagnosing, and/or treating primary hematopoietic disorders.

[0605] Hyperproliferative Disorders

[0606] Ovarian and/or breast cancer associated polynucleotides or polypeptides, or agonists or antagonists thereof, can be used to treat, prevent, diagnose and/or prognose hyperproliferative diseases, disorders, and/or conditions, including neoplasms.

[0607] In a specific embodiment, ovarian and/or breast cancer associated polynucleotides or polypeptides, or agonists or antagonists thereof, can be used to treat, prevent, and/or diagnose hyperproliferative diseases, disorders, and/or conditions of the ovarian and/or breast cancer.

[0608] In a preferred embodiment, ovarian and/or breast cancer associated polynucleotides or polypeptides, or agonists or antagonists thereof, can be used to treat, prevent, and/or diagnose ovarian and/or breast neoplasms.

[0609] Ovarian and/or breast cancer associated polynucleotides or polypeptides, or agonists or antagonists of the invention, may inhibit the proliferation of the disorder through direct or indirect interactions. Alternatively, ovarian and/or breast cancer associated polynucleotides or polypeptides, or agonists or antagonists thereof, may proliferate other cells, which can inhibit the hyperproliferative disorder.

[0610] For example, by increasing an immune response, particularly increasing antigenic qualities of the hyperproliferative disorder or by proliferating, differentiating, or mobilizing T-cells, hyperproliferative diseases, disorders, and/or conditions can be treated, prevented, and/or diagnosed. This immune response may be increased by either enhancing an existing immune response, or by initiating a new immune response. Alternatively, decreasing an immune response may also be a method of treating, preventing, and/or diagnosing hyperproliferative diseases, disorders, and/or conditions, such as a chemotherapeutic agent.

[0611] Examples of hyperproliferative diseases, disorders, and/or conditions that can be treated, prevented, and/or diagnosed by ovarian and/or breast cancer associated polynucleotides or polypeptides, or agonists or antagonists thereof, include, but are not limited to neoplasms located in the: prostate, colon, abdomen, bone, breast, digestive system, liver, pancreas, peritoneum, endocrine glands (adrenal, parathyroid, pituitary, testicles, ovary, thymus, thyroid), eye, head and neck, nervous (central and peripheral), lymphatic system, pelvic, skin, soft tissue, spleen, thoracic, and urogenital.

[0612] Similarly, other hyperproliferative disorders can also be treated or detected by polynucleotides or polypeptides, or agonists or antagonists of the present invention. Examples of such hyperproliferative disorders include, but are not limited to: Acute Childhood Lymphoblastic Leukemia, Acute Lymphoblastic Leukemia, Acute Lymphocytic Leukemia, Acute Myeloid Leukemia, Adrenocortical Carcinoma, Adult (Primary) Hepatocellular Cancer, Adult (Primary) Liver Cancer, Adult Acute Lymphocytic Leukemia, Adult Acute Myeloid Leukemia, Adult Hodgkin's Disease, Adult Hodgkin's Lymphoma, Adult Lymphocytic Leukemia, Adult Non-Hodgkin's Lymphoma, Adult Primary Liver Cancer, Adult Soft Tissue Sarcoma, AIDS-Related Lymphoma, AIDS-Related Malignancies, Anal Cancer, Astrocytoma, Bile Duct Cancer, Bladder Cancer, Bone Cancer, Brain Stem Glioma, Brain Tumors, Breast Cancer, Cancer of the Renal Pelvis and Ureter, Central Nervous System (Primary) Lymphoma, Central Nervous System Lymphoma, Cerebellar Astrocytoma, Cerebral Astrocytoma, Cervical Cancer, Childhood (Primary) Hepatocellular Cancer, Childhood (Primary) Liver Cancer, Childhood Acute Lymphoblastic Leukemia, Childhood Acute Myeloid Leukemia, Childhood Brain Stem Glioma, Childhood Cerebellar Astrocytoma, Childhood Cerebral Astrocytoma, Childhood Extracranial Germ Cell Tumors, Childhood Hodgkin's Disease, Childhood Hodgkin's Lymphoma, Childhood Hypothalamic and Visual Pathway Glioma, Childhood Lymphoblastic Leukemia, Childhood Medulloblastoma, Childhood Non-Hodgkin's Lymphoma, Childhood Pineal and Supratentorial Primitive Neuroectodermal Tumors, Childhood Primary Liver Cancer, Childhood Rhabdomyosarcoma, Childhood Soft Tissue Sarcoma, Childhood Visual Pathway and Hypothalamic Glioma, Chronic Lymphocytic Leukemia, Chronic Myelogenous Leukemia, Colon Cancer, Cutaneous T-Cell Lymphoma, Endocrine Pancreas Islet Cell Carcinoma, Endometrial Cancer, Ependymoma, Epithelial Cancer, Esophageal Cancer, Ewing's Sarcoma and Related Tumors, Exocrine Pancreatic Cancer, Extracranial Germ Cell Tumor, Extragonadal Germ Cell Tumor, Extrahepatic Bile Duct Cancer, Eye Cancer, Female Breast Cancer, Gaucher's Disease, Gallbladder Cancer, Gastric Cancer, Gastrointestinal Carcinoid Tumor, Gastrointestinal Tumors, Germ Cell Tumors, Gestational Trophoblastic Tumor, Hairy Cell Leukemia, Head and Neck Cancer, Hepatocellular Cancer, Hodgkin's Disease, Hodgkin's Lymphoma, Hypergammaglobulinemia, Hypopharyngeal Cancer, Intestinal Cancers, Intraocular Melanoma, Islet Cell Carcinoma, Islet Cell Pancreatic Cancer, Kaposi's Sarcoma, Kidney Cancer, Laryngeal Cancer, Lip and Oral Cavity Cancer, Liver Cancer, Lung Cancer, Lymphoproliferative Disorders, Macroglobulinemia, Male Breast Cancer, Malignant Mesothelioma, Malignant Thymoma, Medulloblastoma, Melanoma, Mesothelioma, Metastatic Occult Primary Squamous Neck Cancer, Metastatic Primary Squamous Neck Cancer, Metastatic Squamous Neck Cancer, Multiple Myeloma, Multiple Myeloma/Plasma Cell Neoplasm, Myelodysplastic Syndrome, Myelogenous Leukemia, Myeloid Leukemia, Myeloproliferative Disorders, Nasal Cavity and Paranasal Sinus Cancer, Nasopharyngeal Cancer, Neuroblastoma, Non-Hodgkin's Lymphoma During Pregnancy, Nonmelanoma Skin Cancer, Non-Small Cell Lung Cancer, Occult Primary Metastatic Squamous Neck Cancer, Oropharyngeal Cancer, Osteo-/Malignant Fibrous Sarcoma, Osteosarcoma/Malignant Fibrous Histiocytoma, Osteosarcoma/Malignant Fibrous Histiocytoma of Bone, Ovarian Epithelial Cancer, Ovarian Germ Cell Tumor, Ovarian Low Malignant Potential Tumor, Pancreatic Cancer, Paraproteinemias, Purpura, Parathyroid Cancer, Penile Cancer, Pheochromocytoma, Pituitary Tumor, Plasma Cell Neoplasm/Multiple Myeloma, Primary Central Nervous System Lymphoma, Primary Liver Cancer, Prostate Cancer, Rectal Cancer, Renal Cell Cancer, Renal Pelvis and Ureter Cancer, Retinoblastoma, Rhabdomyosarcoma, Salivary Gland Cancer, Sarcoidosis Sarcomas, Sezary Syndrome, Skin Cancer, Small Cell Lung Cancer, Small Intestine Cancer, Soft Tissue Sarcoma, Squamous Neck Cancer, Stomach Cancer, Supratentorial Primitive Neuroectodermal and Pineal Tumors, T-Cell Lymphoma, Testicular Cancer, Thymoma, Thyroid Cancer, Transitional Cell Cancer of the Renal Pelvis and Ureter, Transitional Renal Pelvis and Ureter Cancer, Trophoblastic Tumors, Ureter and Renal Pelvis Cell Cancer, Urethral Cancer, Uterine Cancer, Uterine Sarcoma, Vaginal Cancer, Visual Pathway and Hypothalamic Glioma, Vulvar Cancer, Waldenstrom's Macroglobulinemia, Wilms' Tumor, and any other hyperproliferative disease, besides neoplasia, located in an organ system listed above.

[0613] In another preferred embodiment, polynucleotides or polypeptides, or agonists or antagonists of the present invention are used to diagnose, prognose, prevent, and/or treat premalignant conditions and to prevent progression to a neoplastic or malignant state, including but not limited to those disorders described above. Such uses are indicated in conditions known or suspected of preceding progression to neoplasia or cancer, in particular, where non-neoplastic cell growth consisting of hyperplasia, metaplasia, or most particularly, dysplasia has occurred (for review of such abnormal growth conditions, see Robbins and Angell, 1976, Basic Pathology, 2d Ed., W. B. Saunders Co., Philadelphia, pp. 68-79.)

[0614] Hyperplasia is a form of controlled cell proliferation, involving an increase in cell number in a tissue or organ, without significant alteration in structure or function. Hyperplastic disorders which can be diagnosed, prognosed, prevented, and/or treated with compositions of the invention (including polynucleotides, polypeptides, agonists or antagonists) include, but are not limited to, angiofollicular mediastinal lymph node hyperplasia, angiolymphoid hyperplasia with eosinophilia, a typical melanocytic hyperplasia, basal cell hyperplasia, benign giant lymph node hyperplasia, cementum hyperplasia, congenital adrenal hyperplasia, congenital sebaceous hyperplasia, cystic hyperplasia, cystic hyperplasia of the breast, denture hyperplasia, ductal hyperplasia, endometrial hyperplasia, fibromuscular hyperplasia, focal epithelial hyperplasia, gingival hyperplasia, inflammatory fibrous hyperplasia, inflammatory papillary hyperplasia, intravascular papillary endothelial hyperplasia, nodular hyperplasia of prostate, nodular regenerative hyperplasia, pseudoepitheliomatous hyperplasia, senile sebaceous hyperplasia, and verrucous hyperplasia.

[0615] Metaplasia is a form of controlled cell growth in which one type of adult or fully differentiated cell substitutes for another type of adult cell. Metaplastic disorders which can be diagnosed, prognosed, prevented, and/or treated with compositions of the invention (including polynucleotides, polypeptides, agonists or antagonists) include, but are not limited to, agnogenic myeloid metaplasia, apocrine metaplasia, a typical metaplasia, autoparenchymatous metaplasia, connective tissue metaplasia, epithelial metaplasia, intestinal metaplasia, metaplastic anemia, metaplastic ossification, metaplastic polyps, myeloid metaplasia, primary myeloid metaplasia, secondary myeloid metaplasia, squamous metaplasia, squamous metaplasia of amnion, and symptomatic myeloid metaplasia.

[0616] Dysplasia is frequently a forerunner of cancer, and is found mainly in the epithelia; it is the most disorderly form of non-neoplastic cell growth, involving a loss in individual cell uniformity and in the architectural orientation of cells. Dysplastic cells often have abnormally large, deeply stained nuclei, and exhibit pleomorphism. Dysplasia characteristically occurs where there exists chronic irritation or inflammation. Dysplastic disorders which can be diagnosed, prognosed, prevented, and/or treated with compositions of the invention (including polynucleotides, polypeptides, agonists or antagonists) include, but are not limited to, anhidrotic ectodermal dysplasia, anterofacial dysplasia, asphyxiating thoracic dysplasia, atriodigital dysplasia, bronchopulmonary dysplasia, cerebral dysplasia, cervical dysplasia, chondroectodermal dysplasia, cleidocranial dysplasia, congenital ectodermal dysplasia, craniodiaphysial dysplasia, craniocarpotarsal dysplasia, craniometaphysial dysplasia, dentin dysplasia, diaphysial dysplasia, ectodermal dysplasia, enamel dysplasia, encephalo-ophthalmic dysplasia, dysplasia epiphysialis hemimelia, dysplasia epiphysialis multiplex, dysplasia epiphysialis punctata, epithelial dysplasia, faciodigitogenital dysplasia, familial fibrous dysplasia of jaws, familial white folded dysplasia, fibromuscular dysplasia, fibrous dysplasia of bone, florid osseous dysplasia, hereditary renal-retinal dysplasia, hidrotic ectodermal dysplasia, hypohidrotic ectodermal dysplasia, lymphopenic thymic dysplasia, mammary dysplasia, mandibulofacial dysplasia, metaphysial dysplasia, Mondini dysplasia, monostotic fibrous dysplasia, mucoepithelial dysplasia, multiple epiphysial dysplasia, oculoauriculovertebral dysplasia, oculodentodigital dysplasia, oculovertebral dysplasia, odontogenic dysplasia, ophthalmomandibulomelic dysplasia, periapical cemental dysplasia, polyostotic fibrous dysplasia, pseudoachondroplastic spondyloepiphysial dysplasia, retinal dysplasia, septo-optic dysplasia, spondyloepiphysial dysplasia, and ventriculoradial dysplasia.

[0617] Additional pre-neoplastic disorders which can be diagnosed, prognosed, prevented, and/or treated with compositions of the invention (including polynucleotides, polypeptides, agonists or antagonists) include, but are not limited to, benign dysproliferative disorders (e.g., benign tumors, fibrocystic conditions, tissue hypertrophy, intestinal polyps, colon polyps, and esophageal dysplasia), leukoplakia, keratoses, Bowen's disease, Farmer's Skin, solar cheilitis, and solar keratosis.

[0618] In another embodiment, a potypeptide of the invention, or polynucleotides, antibodies, agonists, or antagonists corresponding to that polypeptide, may be used to diagnose and/or prognose disorders associated with the tissue(s) in which the polypeptide of the invention is expressed, including one, two, three, four, five, or more tissues disclosed in Table 1A, 7 (Tissue Distribution Library Code).

[0619] In another embodiment, polynucleotides, polypeptides, antibodies, and/or agonists or antagonists of the present invention conjugated to a toxin or a radioactive isotope, as described herein, may be used to treat cancers and neoplasms, including, but not limited to those described herein. In a further preferred embodiment, polynucleotides, polypeptides, antibodies, and/or agonists or antagonists of the present invention conjugated to a toxin or a radioactive isotope, as described herein, may be used to treat acute myelogenous leukemia.

[0620] Additionally, polynucleotides, polypeptides, and/or agonists or antagonists of the invention may affect apoptosis, and therefore, would be useful in treating a number of diseases associated with increased cell survival or the inhibition of apoptosis. For example, diseases associated with increased cell survival or the inhibition of apoptosis that could be diagnosed, prognosed, prevented, and/or treated by polynucleotides, polypeptides, and/or agonists or antagonists of the invention, include cancers (such as follicular lymphomas, carcinomas with p53 mutations, and hormone-dependent tumors, including, but not limited to colon cancer, cardiac tumors, pancreatic cancer, melanoma, retinoblastoma, glioblastoma, lung cancer, intestinal cancer, testicular cancer, stomach cancer, neuroblastoma, myxoma, myoma, lymphoma, endothelioma, osteoblastoma, osteoclastoma, osteosarcoma, chondrosarcoma, adenoma, breast cancer, prostate cancer, Kaposi's sarcoma and ovarian cancer); autoimmune disorders such as, multiple sclerosis, Sjogren's syndrome, Hashimoto's thyroiditis, biliary cirrhosis, Behcet's disease, Crohn's disease, polymyositis, systemic lupus erythematosus and immune-related glomerulonephritis and rheumatoid arthritis) and viral infections (such as herpes viruses, pox viruses and adenoviruses), inflammation, graft v. host disease, acute graft rejection, and chronic graft rejection.

[0621] In preferred embodiments, polynucleotides, polypeptides, and/or agonists or antagonists of the invention are used to inhibit growth, progression, and/or metastasis of cancers, in particular those listed above.

[0622] Additional diseases or conditions associated with increased cell survival that could be diagnosed, prognosed, prevented, and/or treated by polynucleotides, polypeptides, and/or agonists or antagonists of the invention, include, but are not limited to, progression, and/or metastases of malignancies and related disorders such as leukemia (including acute leukemias (e.g., acute lymphocytic leukemia, acute myelocytic leukemia (including myeloblastic, promyelocytic, myelomonocytic, monocytic, and erythroleukemia)) and chronic leukemias (e.g., chronic myelocytic (granulocytic) leukemia and chronic lymphocytic leukemia)), polycythemia vera, lymphomas (e.g., Hodgkin's disease and non-Hodgkin's disease), multiple myeloma, Waldenstrom's macroglobulinemia, heavy chain disease, and solid tumors including, but not limited to, sarcomas and carcinomas such as fibrosarcoma, myxosarcoma, liposarcoma, chondrosarcoma, osteogenic sarcoma, chordoma, angiosarcoma, endotheliosarcoma, lymphangiosarcoma, lymphangioendotheliosarcoma, synovioma, mesothelioma, Ewing's tumor, Iciomyosarcoma, rhabdomyosarcoma, colon carcinoma, pancreatic cancer, breast cancer, ovarian cancer, prostate cancer, squamous cell carcinoma, basal cell carcinoma, adenocarcinoma, sweat gland carcinoma, sebaceous gland carcinoma, papillary carcinoma, papillary adenocarcinomas, cystadenocarcinoma, medullary carcinoma, bronchogenic carcinoma, renal cell carcinoma, hepatoma, bile duct carcinoma, choriocarcinoma, seminoma, embryonal carcinoma, Wilm's tumor, cervical cancer, testicular tumor, lung carcinoma, small cell lung carcinoma, bladder carcinoma, epithelial carcinoma, glioma, astrocytoma, medulloblastoma, craniopharyngioma, ependymoma, pinealoma, emangioblastoma, acoustic neuroma, oligodendroglioma, menangioma, melanoma, neuroblastoma, and retinoblastoma.

[0623] Diseases associated with increased apoptosis that could be diagnosed, prognosed, prevented, and/or treated by polynucleotides, polypeptides, and/or agonists or antagonists of the invention, include AIDS; neurodegenerative disorders (such as Alzheimer's disease, Parkinson's disease, amyotrophic lateral sclerosis, retinitis pigmentosa, cerebellar degeneration and brain tumor or prior associated disease); autoimmune disorders (such as, multiple sclerosis, Sjogren's syndrome, Hashimoto's thyroiditis, biliary cirrhosis, Behcet's disease, Crohn's disease, polymyositis, systemic lupus erythematosus and immune-related glomerulonephritis and rheumatoid arthritis) myelodysplastic syndromes (such as aplastic anemia), graft v. host disease, ischemic injury (such as that caused by myocardial infarction, stroke and reperfusion injury), liver injury (e.g., hepatitis related liver injury, ischemia/reperfusion injury, cholestosis (bile duct injury) and liver cancer); toxin-induced liver disease (such as that caused by alcohol), septic shock, cachexia and anorexia.

[0624] Hyperproliferative diseases and/or disorders that could be diagnosed, prognosed, prevented, and/or treated by polynucleotides, polypeptides, and/or agonists or antagonists of the invention, include, but are not limited to, neoplasms located in the liver, abdomen, bone, breast, digestive system, pancreas, peritoneum, endocrine glands (adrenal, parathyroid, pituitary, testicles, ovary, thymus, thyroid), eye, head and neck, nervous system (central and peripheral), lymphatic system, pelvis, skin, soft tissue, spleen, thorax, and urogenital tract.

[0625] Similarly, other hyperproliferative disorders can also be diagnosed, prognosed, prevented, and/or treated by polynucleotides, polypeptides, and/or agonists or antagonists of the invention. Examples of such hyperproliferative disorders include, but are not limited to: hypergammaglobulinemia, lymphoproliferative disorders, paraproteinemias, purpura, sarcoidosis, Sezary Syndrome, Waldenstron's macroglobulinemia, Gaucher's Disease, histiocytosis, and any other hyperproliferative disease, besides neoplasia, located in an organ system listed above.

[0626] One preferred embodiment utilizes polynucleotides of the present invention to inhibit aberrant cellular division, by gene therapy using the present invention, and/or protein fusions or fragments thereof.

[0627] Thus, the present invention provides a method for treating cell proliferative diseases, disorders, and/or conditions by inserting into an abnormally proliferating cell a polynucleotide of the present invention, wherein said polynucleotide represses said cell proliferation, disease, disorder, and/or condition.

[0628] In a preferred embodiment, the present invention provides a method for treating cell proliferative diseases, disorders and/or conditions of ovarian and/or breast cancer by inserting into a cell, a polynucleotide of the present invention, wherein said polynucleotide represses said cell proliferation, disease and/or disorder.

[0629] Another embodiment of the present invention provides a method of treating cell-proliferative diseases, disorders, and/or conditions in individuals comprising administration of one or more active gene copies of the present invention to an abnormally proliferating cell or cells. In a preferred embodiment, polynucleotides of the present invention is a DNA construct comprising a recombinant expression vector effective in expressing a DNA sequence encoding said polynucleotides. In another preferred embodiment of the present invention, the DNA construct encoding the polynucleotides of the present invention is inserted into cells to be treated utilizing a retrovirus, or more preferably an adenoviral vector (see, e.g., G J. Nabel, et. al., PNAS 96: 324-326 (1999), which is hereby incorporated by reference). In a most preferred embodiment, the viral vector is defective and will not transform non-proliferating cells, only proliferating cells. Moreover, in a preferred embodiment, the polynucleotides of the present invention inserted into proliferating cells either alone, or in combination with or fused to other polynucleotides, can then be modulated via an external stimulus (i.e., magnetic, specific small molecule, chemical, or drug administration, etc.), which acts upon the promoter upstream of said polynucleotides to induce expression of the encoded protein product. As such the beneficial therapeutic affect of the present invention may be expressly modulated (i.e., to increase, decrease, or inhibit expression of the present invention) based upon said external stimulus.

[0630] Polynucleotides of the present invention may be useful in repressing expression of oncogenic genes or antigens. By “repressing expression of the oncogenic genes” is intended the suppression of the transcription of the gene, the degradation of the gene transcript (pre-message RNA), the inhibition of splicing, the destruction of the messenger RNA, the prevention of the post-translational modifications of the protein, the destruction of the protein, or the inhibition of the normal function of the protein.

[0631] For local administration to abnormally proliferating cells, polynucleotides of the present invention may be administered by any method known to those of skill in the art including, but not limited to transfection, electroporation, microinjection of cells, or in vehicles such as liposomes, lipofectin, or as naked polynucleotides, or any other method described throughout the specification. The polynucleotide of the present invention may be delivered by known gene delivery systems such as, but not limited to, retroviral vectors (Gilboa, J. Virology 44:845 (1982); Hocke, Nature 320:275 (1986); Wilson, et al., Proc. Natl. Acad. Sci. U.S.A. 85:3014), vaccinia virus system (Chakrabarty et al., Mol. Cell Biol. 5:3403 (1985) or other efficient DNA delivery systems (Yates et al., Nature 313:812 (1985)) known to those skilled in the art. These references are exemplary only and are hereby incorporated by reference. In order to specifically deliver or transfect cells which are abnormally proliferating and spare non-dividing cells, it is preferable to utilize a retrovirus, or adenoviral (as described in the art and elsewhere herein) delivery system known to those of skill in the art. Since host DNA replication is required for retroviral DNA to integrate and the retrovirus will be unable to self replicate due to the lack of the retrovirus genes needed for its life cycle. Utilizing such a retroviral delivery system for polynucleotides of the present invention will target said gene and constructs to abnormally proliferating cells and will spare the non-dividing normal cells.

[0632] The polynucleotides of the present invention may be delivered directly to cell proliferative disorder/disease sites in internal organs, body cavities and the like by use of imaging devices used to guide an injecting needle directly to the disease site. The polynucleotides of the present invention may also be administered to disease sites at the time of surgical intervention.

[0633] By “cell proliferative disease” is meant any human or animal disease or disorder, affecting any one or any combination of organs, cavities, or body parts, which is characterized by single or multiple local abnormal proliferations of cells, groups of cells, or tissues, whether benign or malignant.

[0634] Any amount of the polynucleotides of the present invention may be administered as long as it has a biologically inhibiting effect on the proliferation of the treated cells. Moreover, it is possible to administer more than one of the polynucleotide of the present invention simultaneously to the same site. By “biologically inhibiting” is meant partial or total growth inhibition as well as decreases in the rate of proliferation or growth of the cells. The biologically inhibitory dose may be determined by assessing the effects of the polynucleotides of the present invention on target malignant or abnormally proliferating cell growth in tissue culture, tumor growth in animals and cell cultures, or any other method known to one of ordinary skill in the art.

[0635] The present invention is further directed to antibody-based therapies which involve administering of anti-polypeptides and anti-polynucleotide antibodies to a mammalian, preferably human, patient for treating one or more of the described diseases, disorders, and/or conditions. Methods for producing anti-polypeptides and anti-polynucleotide antibodies polyclonal and monoclonal antibodies are described in detail elsewhere herein. Such antibodies may be provided in pharmaceutically acceptable compositions as known in the art or as described herein.

[0636] A summary of the ways in which the antibodies of the present invention may be used therapeutically includes binding polynucleotides or polypeptides of the present invention locally or systemically in the body or by direct cytotoxicity of the antibody, e.g., as mediated by complement (CDC) or by effector cells (ADCC). Some of these approaches are described in more detail below. Armed with the teachings provided herein, one of ordinary skill in the art will know how to use the antibodies of the present invention for diagnostic, monitoring or therapeutic purposes without undue experimentation.

[0637] In particular, the antibodies, fragments and derivatives of the present invention are useful for treating a subject having or developing cell proliferative and/or differentiation diseases, disorders, and/or conditions as described herein. Such treatment comprises administering a single or multiple doses of the antibody, or a fragment, derivative, or a conjugate thereof.

[0638] The antibodies of this invention may be advantageously utilized in combination with other monoclonal or chimeric antibodies, or with lymphokines or hematopoietic growth factors, for example, which serve to increase the number or activity of effector cells which interact with the antibodies.

[0639] It is preferred to use high affinity and/or potent in vivo inhibiting and/or neutralizing antibodies against polypeptides or polynucleotides of the present invention, fragments or regions thereof, for both immunoassays directed to and therapy of diseases, disorders, and/or conditions related to polynucleotides or polypeptides, including fragments thereof, of the present invention. Such antibodies, fragments, or regions, will preferably have an affinity for polynucleotides or polypeptides, including fragments thereof. Preferred binding affinities include those with a dissociation constant or Kd less than 5×10⁻⁶M, 10⁻⁶M, 5×10⁻⁷M, 10⁻⁷M, 5×10⁻⁸M, 10⁻⁸M, 5×10⁻⁹M, 10⁻⁹M, 5×10⁻¹⁰M, 10⁻¹⁰M, 5×10⁻¹¹M, 10⁻¹¹M, 5×10⁻¹²M, 10⁻¹²M, 5×10⁻¹³M, 10⁻¹³M, 5×10⁻¹⁴M, 10⁻¹⁴M, 5×10⁻¹⁵M, and 10⁻¹⁵M.

[0640] Moreover, ovarian and/or breast cancer antigen polypeptides of the present invention or fragments thereof, are useful in inhibiting the angiogenesis of proliferative cells or tissues, either alone, as a protein fusion, or in combination with other polypeptides directly or indirectly, as described elsewhere herein. In a most preferred embodiment, said anti-angiogenesis effect may be achieved indirectly, for example, through the inhibition of hematopoietic, tumor-specific cells, such as tumor-associated macrophages (see, e.g., Joseph I B, et al. J Natl Cancer Inst, 90(21):1648-53 (1998), which is hereby incorporated by reference). Antibodies directed to polypeptides or polynucleotides of the present invention may also result in inhibition of angiogenesis directly, or indirectly (see, e.g., Witte L, et al., Cancer Metastasis Rev. 17(2):155-61 (1998), which is hereby incorporated by reference)).

[0641] Polypeptides, including protein fusions, of the present invention, or fragments thereof may be useful in inhibiting proliferative cells or tissues through the induction of apoptosis. Said polypeptides may act either directly, or indirectly to induce apoptosis of proliferative cells and tissues, for example in the activation of a death-domain receptor, such as tumor necrosis factor (TNF) receptor-1, CD95 (Fas/APO-1), TNF-receptor-related apoptosis-mediated protein (TRAMP) and TNF-related apoptosis-inducing ligand (TRAIL) receptor-1 and -2 (see, e.g., Schulze-Osthoff K, et.al., Eur J Biochem 254(3):439-59 (1998), which is hereby incorporated by reference). Moreover, in another preferred embodiment of the present invention, said polypeptides may induce apoptosis through other mechanisms, such as in the activation of other proteins which will activate apoptosis, or through stimulating the expression of said proteins, either alone or in combination with small molecule drugs or adjuvants, such as apoptonin, galectins, thioredoxins, antiinflammatory proteins (See for example, Mutat. Res. 400(1-2):447-55 (1998), Med Hypotheses. 50(5):423-33 (1998), Chem. Biol. Interact. Apr 24;111-112:23-34 (1998), J. Mo. Med. 76(6):402-12 (1998), Int. J. Tissue React. 20(1):3-15 (1998), which are all hereby incorporated by reference).

[0642] Polypeptides, including protein fusions to, or fragments thereof, of the present invention are useful in inhibiting the metastasis of proliferative cells or tissues. Inhibition may occur as a direct result of administering polypeptides, or antibodies directed to said polypeptides as described elsewhere herein, or indirectly, such as activating the expression of proteins known to inhibit metastasis, for example alpha 4 integrins, (See, e.g., Curr Top Microbiol Immunol 1998;231:125-41, which is hereby incorporated by reference). Such therapeutic affects of the present invention may be achieved either alone, or in combination with small molecule drugs or adjuvants.

[0643] In another embodiment, the invention provides a method of delivering compositions containing the polypeptides of the invention (e.g., compositions containing polypeptides or anti-ovarian and/or breast cancer antigen polypeptide antibodies associated with heterologous polypeptides, heterologous nucleic acids, toxins, or prodrugs) to targeted cells expressing the polypeptide of the present invention. Ovarian and/or breast cancer antigen polypeptides or anti-ovarian and/or breast cancer antigen polypeptide antibodies of the invention may be associated with heterologous polypeptides, heterologous nucleic acids, toxins, or prodrugs via hydrophobic, hydrophilic, ionic and/or covalent interactions.

[0644] Polypeptides, protein fusions to, or fragments thereof, of the present invention are useful in enhancing the immunogenicity and/or antigenicity of proliferating cells or tissues, either directly, such as would occur if the polypeptides of the present invention ‘vaccinated’ the immune response to respond to proliferative antigens and immunogens, or indirectly, such as in activating the expression of proteins known to enhance the immune response (e.g. chemokines), to said antigens and immunogens.

[0645] Urinary System Disorders

[0646] Polynucleotides, polypeptides, antibodies, and/or agonists or antagonists of the present invention, may be used to treat, prevent, diagnose, and/or prognose disorders of the urinary system, including but not limited to disorders of the renal system, bladder, ureters, and urethra. Renal disorders include, but are not limited to, kidney failure, nephritis, blood vessel disorders of kidney, metabolic and congenital kidney disorders, urinary disorders of the kidney, autoimmune disorders, sclerosis and necrosis, electrolyte imbalance, and kidney cancers.

[0647] Kidney failure diseases include, but are not limited to, acute kidney failure, chronic kidney failure, atheroembolic renal failure, and end-stage renal disease. Inflammatory diseases of the kidney include acute glomerulonephritis, postinfectious glomerulonephritis, rapidly progressive glomerulonephritis, nephrotic syndrome, membranous glomerulonephritis, familial nephrotic syndrome, membranoproliferative glomerulonephritis I and II, mesangial proliferative glomerulonephritis, chronic glomerulonephritis, acute tubulointerstitial nephritis, chronic tubulointerstitial nephritis, acute post-streptococcal glomerulonephritis (PSGN), pyelonephritis, lupus nephritis, chronic nephritis, interstitial nephritis, and post-streptococcal glomerulonephritis.

[0648] Blood vessel disorders of the kidneys include, but are not limited to, kidney infarction, atheroembolic kidney disease, cortical necrosis, malignant nephrosclerosis, renal vein thrombosis, renal underperfusion, renal ischemia-reperfusion, renal artery embolism, and renal artery stenosis. Kidney disorders resulting form urinary tract problems include, but are not limited to, pyelonephritis, hydronephrosis, urolithiasis (renal lithiasis, nephrolithiasis), reflux nephropathy, urinary tract infections, urinary retention, and acute or chronic unilateral obstructive uropathy.

[0649] Metabolic and congenital disorders of the kidneys include, but are not limited to, renal tubular acidosis, renal glycosuria, nephrogenic diabetes insipidus, cystinuria, Fanconi's syndrome, vitamin D-resistant rickets, Hartnup disease, Bartter's syndrome, Liddle's syndrome, polycystic kidney disease, medullary cystic disease, medullary sponge kidney, Alport's syndrome, nail-patella syndrome, congenital nephrotic syndrome, CRUSH syndrome, horseshoe kidney, diabetic nephropathy, nephrogenic diabetes insipidus, analgesic nephropathy, kidney stones, and membranous nephropathy, Kidney disorders resulting from an autoimmune response include, but are not limited to, systemic lupus erythematosus (SLE), Goodpasture syndrome, IgA nephropathy, and IgM mesangial proliferative glomerulonephritis.

[0650] Sclerotic or necrotic disorders of the kidney include, but are not limited to, glomerulosclerosis, diabetic nephropathy, focal segmental glomerulosclerosis (FSGS), necrotizing glomerulonephritis, and renal papillary necrosis. Kidneys may also develop carcinomas, including, but not limited to, hypemephroma, nephroblastoma, renal cell cancer, transitional cell cancer, squamous cell cancer, and Wilm's tumor.

[0651] Kidney disorders may also result in electrolyte imbalances, including, but not limited to, nephrocalcinosis, pyuria, edema, hydronephritis, proteinuria, hyponatremia, hypernatremia, hypokalemia, hyperkalemia, hypocalcemia, hypercalcemia, hypophosphatemia, and hyperphosphatemia.

[0652] Bladder disorders include, but are not limited to, benign prostatic hyperplasia (BPH), interstitial cystitis (IC), prostatitis, proteinuria, urinary tract infections, urinary incontinence, urinary retention. Disorders of the ureters and urethra include, but are not limited to, acute or chronic unilateral obstructive uropathy. The bladder, ureters, and urethra may also develop carcinomas, including, but not limited to, superficial bladder canccer, invasive bladder cancer, carcinoma of the ureter, and urethra cancers.

[0653] Polypeptides may be administered using any method known in the art, including, but not limited to, direct needle injection at the delivery site, intravenous injection, topical administration, catheter infusion, biolistic injectors, particle accelerators, gelfoam sponge depots, other commercially available depot materials, osmotic pumps, oral or suppositorial solid pharmaceutical formulations, decanting or topical applications during surgery, aerosol delivery. Such methods are known in the art. Polypeptides may be administered as part of a Therapeutic, described in more detail below. Methods of delivering polynucleotides are described in more detail herein.

[0654] Cardiovascular Disorders

[0655] Polynucleotides or polypeptides, or agonists or antagonists of the present invention, may be used to treat, prevent, diagnose, and/or prognose cardiovascular disorders, including, but not limited to, peripheral artery disease, such as limb ischemia.

[0656] Cardiovascular disorders include cardiovascular abnormalities, such as arterio-arterial fistula, arteriovenous fistula, cerebral arteriovenous malformations, congenital heart defects, pulmonary atresia, and Scimitar Syndrome. Congenital heart defects include aortic coarctation, cor triatriatum, coronary vessel anomalies, crisscross heart, dextrocardia, patent ductus arteriosus, Ebstein's anomaly, Eisenmenger complex, hypoplastic left heart syndrome, levocardia, tetralogy of fallot, transposition of great vessels, double outlet right ventricle, tricuspid atresia, persistent truncus arteriosus, total anomalous pulmonary venous connection, hypoplastic left heart syndrome, and heart septal defects, such as aortopulmonary septal defect, endocardial cushion defects, Lutembacher's Syndrome, atrioventricular canal defect, trilogy of Fallot, ventricular heart septal defects.

[0657] Cardiovascular disorders also include heart disease, such as arrhythmias, carcinoid heart disease, high cardiac output, low cardiac output, cardiac tamponade, endocarditis (including bacterial), heart aneurysm, cardiac arrest, sudden cardiac death, congestive heart failure, congestive cardiomyopathy, paroxysmal dyspnea, cardiac edema, heart hypertrophy, congestive cardiomyopathy, left ventricular hypertrophy, right ventricular hypertrophy, post-infarction heart rupture, ventricular septal rupture, heart valve diseases, myocardial diseases, myocardial ischemia, pericardial effusion, pericarditis (including constrictive and tuberculous), pneumopericardium, postpericardiotomy syndrome, pulmonary heart disease, rheumatic heart disease, ventricular dysfunction, hyperemia, cardiovascular pregnancy complications, Scimitar Syndrome, diastolic dysfunction, enlarged heart, heart block, J-curve phenomenon, rheumatic heart disease, Marfan syndrome, cardiovascular syphilis, and cardiovascular tuberculosis.

[0658] Arrhythmias include sinus arrhythmia, atrial fibrillation, atrial flutter, bradycardia, extrasystole, Adams-Stokes Syndrome, bundle-branch block, sinoatrial block, long QT syndrome, parasystole, Lown-Ganong-Levine Syndrome, Mahaim-type pre-excitation syndrome, Wolff-Parkinson-White syndrome, sick sinus syndrome, tachycardias, and ventricular fibrillation. Tachycardias include paroxysmal tachycardia, supraventricular tachycardia, accelerated idioventricular rhythm, atrioventricular nodal reentry tachycardia, ectopic atrial tachycardia, ectopic junctional tachycardia, sinoatrial nodal reentry tachycardia, sinus tachycardia, Torsades de Pointes, and ventricular tachycardia.

[0659] Heart valve disease include aortic valve insufficiency, aortic valve stenosis, heart murmurs, aortic valve prolapse, mitral valve prolapse, tricuspid valve prolapse, mitral valve insufficiency, mitral valve stenosis, pulmonary atresia, pulmonary valve insufficiency, pulmonary valve stenosis, tricuspid atresia, tricuspid valve insufficiency, tricuspid valve stenosis, and bicuspid aortic valve.

[0660] Myocardial diseases include alcoholic cardiomyopathy, congestive cardiomyopathy, hypertrophic cardiomyopathy, aortic subvalvular stenosis, pulmonary subvalvular stenosis, restrictive cardiomyopathy, Chagas cardiomyopathy, endocardial fibroelastosis, endomyocardial fibrosis, Kearns Syndrome, Barth syndrome, myocardial reperfusion injury, and myocarditis.

[0661] Myocardial ischemias include coronary disease, such as angina pectoris, Prinzmetal's angina, unstable angina, coronary aneurysm, coronary arteriosclerosis, coronary thrombosis, coronary vasospasm, myocardial infarction and myocardial stunning.

[0662] Cardiovascular diseases also include vascular diseases such as aneurysms, angiodysplasia, angiomatosis, bacillary angiomatosis, Hippel-Lindau Disease, Klippel-Trenaunay-Weber Syndrome, Sturge-Weber Syndrome, angioneurotic edema, aortic diseases, Takayasu's Arteritis, aortitis, Leriche's Syndrome, arterial occlusive diseases, arteritis, enarteritis, polyarteritis nodosa, cerebrovascular disorders, diabetic angiopathies, diabetic retinopathy, embolisms, thrombosis, erythromelalgia, hemorrhoids, hepatic veno-occlusive disease, hypertension, hypotension (shock), ischemia, peripheral vascular diseases, phlebitis, superficial phlebitis, pulmonary veno-occlusive disease, chronic obstructive pulmonary disease, Buerger's disease, Raynaud's disease, CREST syndrome, retinal vein occlusion, Scimitar syndrome, superior vena cava syndrome, telangiectasia, atacia telangiectasia, hereditary hemorrhagic telangiectasia, deep vein thrombosis, varicocele, varicose veins, varicose ulcer, vasculitis, and venous insufficiency.

[0663] Aneurysms include dissecting aneurysms, false aneurysms, infected aneurysms, ruptured aneurysms, aortic aneurysms, cerebral aneurysms, coronary aneurysms, heart aneurysms, and iliac aneurysms.

[0664] Arterial occlusive diseases include arteriosclerosis, arteriolosclerosis, atherosclerosis, intermittent claudication, carotid stenosis, fibromuscular dysplasias, mesenteric vascular occlusion, Moyamoya disease, renal artery obstruction, retinal artery occlusion, and thromboangiitis obliterans.

[0665] Cerebrovascular disorders include carotid artery diseases, cerebral amyloid angiopathy, cerebral aneurysm, cerebral anoxia, cerebral arteriosclerosis, cerebral arteriovenous malformation, cerebral artery diseases, cerebral embolism and thrombosis, carotid artery thrombosis, sinus thrombosis, Wallenberg's syndrome, cerebral hemorrhage, epidural hematoma, subdural hematoma, subaraxhnoid hemorrhage, cerebral infarction, cerebral ischemia (including transient), subclavian steal syndrome, periventricular leukomalacia, vascular headache, cluster headache, migraine, and vertebrobasilar insufficiency.

[0666] Embolisms include air embolisms, amniotic fluid embolisms, cholesterol embolisms, blue toe syndrome, fat embolisms, pulmonary embolisms, and thromoboembolisms. Thrombosis include coronary thrombosis, hepatic vein thrombosis, deep vein thrombosis, retinal vein occlusion, carotid artery thrombosis, sinus thrombosis, Wallenberg's syndrome, and thrombophlebitis.

[0667] Ischemia includes cerebral ischemia, ischemic colitis, silent ischemia, compartment syndromes, anterior compartment syndrome, myocardial ischemia, reperfusion injuries, and peripheral limb ischemia. Vasculitis includes aortitis, arteritis, Behcet's Syndrome, Churg-Strauss Syndrome, mucocutaneous lymph node syndrome, thromboangiitis obliterans, hypersensitivity vasculitis, Schoenlein-Henoch purpura, allergic cutaneous vasculitis, and Wegener's granulomatosis.

[0668] Cardiovascular diseases can also occur due to electrolyte imbalances that include, but are not limited to hyponatremia, hypernatremia, hypokalemia, hyperkalemia, hypocalcemia, hypercalcemia, hypophosphatemia, and hyperphophatemia. Neoplasm and/or cancers of the cardiovascular system include, but are not limited to, myxomas, fibromas, and rhabdomyomas.

[0669] Polypeptides may be administered using any method known in the art, including, but not limited to, direct needle injection at the delivery site, intravenous injection, topical administration, catheter infusion, biolistic injectors, particle accelerators, gelfoam sponge depots, other commercially available depot materials, osmotic pumps, oral or suppositorial solid pharmaceutical formulations, decanting or topical applications during surgery, aerosol delivery. Such methods are known in the art. Polypeptides may be administered as part of a Therapeutic, described in more detail below. Methods of delivering polynucleotides are described in more detail herein.

[0670] Respiratory Disorders

[0671] Polynucleotides or polypeptides, or agonists or antagonists of the present invention may be used to treat, prevent, diagnose, and/or prognose diseases and/or disorders of the respiratory system.

[0672] Diseases and disorders of the respiratory system include, but are not limited to, nasal vestibulitis, nonallergic rhinitis (e.g., acute rhinitis, chronic rhinitis, atrophic rhinitis, vasomotor rhinitis), nasal polyps, and sinusitis, juvenile angiofibromas, cancer of the nose and juvenile papillomas, vocal cord polyps, nodules (singer's nodules), contact ulcers, vocal cord paralysis, laryngoceles, pharyngitis (e.g., viral and bacterial), tonsillitis, tonsillar cellulitis, parapharyngeal abscess, laryngitis, laryngoceles, and throat cancers (e.g., cancer of the nasopharynx, tonsil cancer, larynx cancer), lung cancer (e.g., squamous cell carcinoma, small cell (oat cell) carcinoma, large cell carcinoma, and adenocarcinoma), allergic disorders (eosinophilic pneumonia, hypersensitivity pneumonitis (e.g., extrinsic allergic alveolitis, allergic interstitial pneumonitis, organic dust pneumoconiosis, allergic bronchopulmonary aspergillosis, asthma, Wegener's granulomatosis (granulomatous vasculitis), Goodpasture's syndrome)), pneumonia (e.g., bacterial pneumonia (e.g., Streptococcus pneumoniae (pneumoncoccal pneumonia), Staphylococcus aureus (staphylococcal pneumonia), Gram-negative bacterial pneumonia (caused by, e.g., Klebsiella and Pseudomas spp.), Mycoplasma pneumoniae pneumonia, Hemophilus influenzae pneumonia, Legionella pneumophila (Legionnaires' disease), and Chlamydia psittaci (Psittacosis)), and viral pneumonia (e.g., influenza, chickenpox (varicella).

[0673] Additional diseases and disorders of the respiratory system include, but are not limited to bronchiolitis, polio (poliomyelitis), croup, respiratory syncytial viral infection, mumps, erythema infectiosum (fifth disease), roseola infantum, progressive rubella panencephalitis, german measles, and subacute sclerosing panencephalitis), fungal pneumonia (e.g., Histoplasmosis, Coccidioidomycosis, Blastomycosis, fungal infections in people with severely suppressed immune systems (e.g., cryptococcosis, caused by Cryptococcus neoformans; aspergillosis, caused by Aspergillus spp.; candidiasis, caused by Candida; and mucormycosis)), Pneumocystis carinii (pneumocystis pneumonia), a typical pneumonias (e.g., Mycoplasma and Chlamydia spp.), opportunistic infection pneumonia, nosocomial pneumonia, chemical pneumonitis, and aspiration pneumonia, pleural disorders (e.g., pleurisy, pleural effusion, and pneumothorax (e.g., simple spontaneous pneumothorax, complicated spontaneous pneumothorax, tension pneumothorax)), obstructive airway diseases (e.g., asthma, chronic obstructive pulmonary disease (COPD), emphysema, chronic or acute bronchitis), occupational lung diseases (e.g., silicosis, black lung (coal workers' pneumoconiosis), asbestosis, berylliosis, occupational asthsma, byssinosis, and benign pneumoconioses), Infiltrative Lung Disease (e.g., pulmonary fibrosis (e.g., fibrosing alveolitis, usual interstitial pneumonia), idiopathic pulmonary fibrosis, desquamative interstitial pneumonia, lymphoid interstitial pneumonia, histiocytosis X (e.g., Letterer-Siwe disease, Hand-Schüller-Christian disease, eosinophilic granuloma), idiopathic pulmonary hemosiderosis, sarcoidosis and pulmonary alveolar proteinosis), Acute respiratory distress syndrome (also called, e.g., adult respiratory distress syndrome), edema, pulmonary embolism, bronchitis (e.g., viral, bacterial), bronchiectasis, atelectasis, lung abscess (caused by, e.g., Staphylococcus aureus or Legionella pneumophila), and cystic fibrosis.

[0674] Anti-Angiogenesis Activity

[0675] The naturally occurring balance between endogenous stimulators and inhibitors of angiogenesis is one in which inhibitory influences predominate. Rastinejad et al., Cell 56:345-355 (1989). In those rare instances in which neovascularization occurs under normal physiological conditions, such as wound healing, organ regeneration, embryonic development, and female reproductive processes, angiogenesis is stringently regulated and spatially and temporally delimited. Under conditions of pathological angiogenesis such as that characterizing solid tumor growth, these regulatory controls fail. Unregulated angiogenesis becomes pathologic and sustains progression of many neoplastic and non-neoplastic diseases. A number of serious diseases are dominated by abnormal neovascularization including solid tumor growth and metastases, arthritis, some types of eye disorders, and psoriasis. See, e.g., reviews by Moses et al., Biotech. 9:630-634 (1991); Folkman et al., N. Engl. J. Med., 333:1757-1763 (1995); Auerbach et al., J. Microvasc. Res. 29:401-411 (1985); Folkman, Advances in Cancer Research, eds. Klein and Weinhouse, Academic Press, New York, pp. 175-203 (1985); Patz, Am. J. Opthalmol. 94:715-743 (1982); and Folkman et al., Science 221:719-725 (1983). In a number of pathological conditions, the process of angiogenesis contributes to the disease state. For example, significant data have accumulated which suggest that the growth of solid tumors is dependent on angiogenesis. Folkman and Klagsbrun, Science 235:442-447 (1987).

[0676] The present invention provides for treatment of diseases or disorders associated with neovascularization by administration of the polynucleotides and/or polypeptides of the invention, as well as agonists or antagonists of the present invention. Malignant and metastatic conditions which can be treated with the polynucleotides and polypeptides, or agonists or antagonists of the invention include, but are not limited to, malignancies, solid tumors, and cancers described herein and otherwise known in the art (for a review of such disorders, see Fishman et al., Medicine, 2d Ed., J. B. Lippincott Co., Philadelphia (1985)). Thus, the present invention provides a method of treating an angiogenesis-related disease and/or disorder, comprising administration to an individual in need thereof a therapeutically effective amount of a polynucleotide, polypeptide, antagonist and/or agonist of the invention. For example, polynucleotides, polypeptides, antagonists and/or agonists may be utilized in a variety of additional methods in order to therapeutically treat a cancer or tumor. Cancers which may be treated with polynucleotides, polypeptides, antagonists and/or agonists include, but are not limited to solid tumors, including prostate, lung, breast, ovarian, stomach, pancreas, larynx, esophagus, testes, liver, parotid, biliary tract, colon, rectum, cervix, uterus, endometrium, kidney, bladder, thyroid cancer; primary tumors and metastases; melanomas; glioblastoma; Kaposi's sarcoma; leiomyosarcoma; non-small cell lung cancer; colorectal cancer; advanced malignancies; and blood born tumors such as leukemias. For example, polynucleotides, polypeptides, antagonists and/or agonists may be delivered topically, in order to treat cancers such as skin cancer, head and neck tumors, breast tumors, and Kaposi's sarcoma.

[0677] Within yet other aspects, polynucleotides, polypeptides, antagonists and/or agonists may be utilized to treat superficial forms of bladder cancer by, for example, intravesical administration. Polynucleotides, polypeptides, antagonists and/or agonists may be delivered directly into the tumor, or near the tumor site, via injection or a catheter. Of course, as the artisan of ordinary skill will appreciate, the appropriate mode of administration will vary according to the cancer to be treated. Other modes of delivery are discussed herein.

[0678] Polynucleotides, polypeptides, antagonists and/or agonists may be useful in treating other disorders, besides cancers, which involve angiogenesis. These disorders include, but are not limited to: benign tumors, for example hemangiomas, acoustic neuromas, neurofibromas, trachomas, and pyogenic granulomas; artheroscleric plaques; ocular angiogenic diseases, for example, diabetic retinopathy, retinopathy of prematurity, macular degeneration, corneal graft rejection, neovascular glaucoma, retrolental fibroplasia, rubeosis, retinoblastoma, uvietis and Pterygia (abnormal blood vessel growth) of the eye; rheumatoid arthritis; psoriasis; delayed wound healing; endometriosis; vasculogenesis; granulations; hypertrophic scars (keloids); nonunion fractures; scleroderma; trachoma; vascular adhesions; myocardial angiogenesis; coronary collaterals; cerebral collaterals; arteriovenous malformations; ischemic limb angiogenesis; Osler-Webber Syndrome; plaque neovascularization; telangiectasia; hemophiliac joints; angiofibroma; fibromuscular dysplasia; wound granulation; Crohn's disease; and atherosclerosis.

[0679] For example, within one aspect of the present invention methods are provided for treating hypertrophic scars and keloids, comprising the step of administering a polynucleotide, polypeptide, antagonist and/or agonist of the invention to a hypertrophic scar or keloid.

[0680] Within one embodiment of the present invention polynucleotides, polypeptides, antagonists and/or agonists of the invention are directly injected into a hypertrophic scar or keloid, in order to prevent the progression of these lesions. This therapy is of particular value in the prophylactic treatment of conditions which are known to result in the development of hypertrophic scars and keloids (e.g., burns), and is preferably initiated after the proliferative phase has had time to progress (approximately 14 days after the initial injury), but before hypertrophic scar or keloid development. As noted above, the present invention also provides methods for treating neovascular diseases of the eye, including for example, corneal neovascularization, neovascular glaucoma, proliferative diabetic retinopathy, retrolental fibroplasia and macular degeneration.

[0681] Moreover, ocular disorders associated with neovascularization which can be treated with the polynucleotides and polypeptides of the present invention (including agonists and/or antagonists) include, but are not limited to: neovascular glaucoma, diabetic retinopathy, retinoblastoma, retrolental fibroplasia, uveitis, retinopathy of prematurity macular degeneration, comeal graft neovascularization, as well as other eye inflammatory diseases, ocular tumors and diseases associated with choroidal or iris neovascularization. See, e.g., reviews by Waltman et al., Am. J Ophthal. 85:704-710 (1978) and Gartner et al., Surv. Ophthal. 22:291-312 (1978).

[0682] Thus, within one aspect of the present invention methods are provided for treating neovascular diseases of the eye such as corneal neovascularization (including corneal graft neovascularization), comprising the step of administering to a patient a therapeutically effective amount of a compound (as described above) to the comea, such that the formation of blood vessels is inhibited. Briefly, the comea is a tissue, which normally lacks blood vessels. In certain pathological conditions however, capillaries may extend into the cornea from the pericorneal vascular plexus of the limbus. When the cornea becomes vascularized, it also becomes clouded, resulting in a decline in the patient's visual acuity. Visual loss may become complete if the cornea completely opacitates. A wide variety of disorders can result in corneal neovascularization, including for example, corneal infections (e.g., trachoma, herpes simplex keratitis, leishmaniasis and onchocerciasis), immunological processes (e.g., graft rejection and Stevens-Johnson's syndrome), alkali burns, trauma, inflammation (of any cause), toxic and nutritional deficiency states, and as a complication of wearing contact lenses.

[0683] Within particularly preferred embodiments of the invention, may be prepared for topical administration in saline (combined with any of the preservatives and antimicrobial agents commonly used in ocular preparations), and administered in eyedrop form. The solution or suspension may be prepared in its pure form and administered several times daily. Alternatively, anti-angiogenic compositions, prepared as described above, may also be administered directly to the cornea. Within preferred embodiments, the anti-angiogenic composition is prepared with a muco-adhesive polymer, which binds to cornea. Within further embodiments, the anti-angiogenic factors or anti-angiogenic compositions may be utilized as an adjunct to conventional steroid therapy. Topical therapy may also be useful prophylactically in corneal lesions which are known to have a high probability of inducing an angiogenic response (such as chemical burns). In these instances the treatment, likely in combination with steroids, may be instituted immediately to help prevent subsequent complications.

[0684] Within other embodiments, the compounds described above may be injected directly into the corneal stroma by an ophthalmologist under microscopic guidance. The preferred site of injection may vary with the morphology of the individual lesion, but the goal of the administration would be to place the composition at the advancing front of the vasculature (i.e., interspersed between the blood vessels and the normal cornea). In most cases this would involve perilimbic corneal injection to “protect” the cornea from the advancing blood vessels. This method may also be utilized shortly after a corneal insult in order to prophylactically prevent corneal neovascularization. In this situation, the material could be injected in the perilimbic cornea interspersed between the corneal lesion and its undesired potential limbic blood supply. Such methods may also be utilized in a similar fashion to prevent capillary invasion of transplanted corneas. In a sustained-release form, injections might only be required 2-3 times per year. A steroid could also be added to the injection solution to reduce inflammation resulting from the injection itself.

[0685] Within another aspect of the present invention, methods are provided for treating neovascular glaucoma, comprising the step of administering to a patient a therapeutically effective amount of a polynucleotide, potypeptide, antagonist and/or agonist to the eye, such that the formation of blood vessels is inhibited. In one embodiment, the compound may be administered topically to the eye in order to treat early forms of neovascular glaucoma. Within other embodiments, the compound may be implanted by injection into the region of the anterior chamber angle. Within other embodiments, the compound may also be placed in any location such that the compound is continuously released into the aqueous humor. Within another aspect of the present invention, methods are provided for treating proliferative diabetic retinopathy, comprising the step of administering to a patient a therapeutically effective amount of a polynucleotide, polypeptide, antagonist and/or agonist to the eyes, such that the formation of blood vessels is inhibited.

[0686] Within particularly preferred embodiments of the invention, proliferative diabetic retinopathy may be treated by injection into the aqueous humor or the vitreous, in order to increase the local concentration of the polynucleotide, polypeptide, antagonist and/or agonist in the retina. Preferably, this treatment should be initiated prior to the acquisition of severe disease requiring photocoagulation.

[0687] Within another aspect of the present invention, methods are provided for treating retrolental fibroplasia, comprising the step of administering to a patient a therapeutically effective amount of a polynucleotide, polypeptide, antagonist and/or agonist to the eye, such that the formation of blood vessels is inhibited. The compound may be administered topically, via intravitreous injection and/or via intraocular implants.

[0688] Additionally, disorders which can be treated with the polynucleotides, polypeptides, agonists and/or agonists include, but are not limited to, hemangioma, arthritis, psoriasis, angiofibroma, atherosclerotic plaques, delayed wound healing, granulations, hemophilic joints, hypertrophic scars, nonunion fractures, Osler-Weber syndrome, pyogenic granuloma, scleroderma, trachoma, and vascular adhesions.

[0689] Moreover, disorders and/or states, which can be treated, prevented, diagnosed and/or prognosed with the polynucleotides, polypeptides, agonists and/or agonists of the invention include, but are not limited to, solid tumors, blood born tumors such as leukemias, tumor metastasis, Kaposi's sarcoma, benign tumors, for example hemangiomas, acoustic neuromas, neurofibromas, trachomas, and pyogenic granulomas, rheumatoid arthritis, psoriasis, ocular angiogenic diseases, for example, diabetic retinopathy, retinopathy of prematurity, macular degeneration, corneal graft rejection, neovascular glaucoma, retrolental fibroplasia, rubeosis, retinoblastoma, and uvietis, delayed wound healing, endometriosis, vascluogenesis, granulations, hypertrophic scars (keloids), nonunion fractures, scleroderma, trachoma, vascular adhesions, myocardial angiogenesis, coronary collaterals, cerebral collaterals, arteriovenous malformations, ischemic limb angiogenesis, Osler-Webber Syndrome, plaque neovascularization, telangiectasia, hemophiliac joints, angiofibroma fibromuscular dysplasia, wound granulation, Crohn's disease, atherosclerosis, birth control agent by preventing vascularization required for embryo implantation controlling menstruation, diseases that have angiogenesis as a pathologic consequence such as cat scratch disease (Rochele minalia quintosa), ulcers (Helicobacter pylori), Bartonellosis and bacillary angiomatosis.

[0690] In one aspect of the birth control method, an amount of the compound sufficient to block embryo implantation is administered before or after intercourse and fertilization have occurred, thus providing an effective method of birth control, possibly a “morning after” method. Polynucleotides, polypeptides, agonists and/or agonists may also be used in controlling menstruation or administered as either a peritoneal lavage fluid or for peritoneal implantation in the treatment of endometriosis.

[0691] Polynucleotides, polypeptides, agonists and/or agonists of the present invention may be incorporated into surgical sutures in order to prevent stitch granulomas.

[0692] Polynucleotides, polypeptides, agonists and/or agonists may be utilized in a wide variety of surgical procedures. For example, within one aspect of the present invention a compositions (in the form of, for example, a spray or film) may be utilized to coat or spray an area prior to removal of a tumor, in order to isolate normal surrounding tissues from malignant tissue, and/or to prevent the spread of disease to surrounding tissues. Within other aspects of the present invention, compositions (e.g., in the form of a spray) may be delivered via endoscopic procedures in order to coat tumors, or inhibit angiogenesis in a desired locale. Within yet other aspects of the present invention, surgical meshes, which have been coated with anti-angiogenic compositions of the present invention may be utilized in any procedure wherein a surgical mesh might be utilized. For example, within one embodiment of the invention a surgical mesh laden with an anti-angiogenic composition may be utilized during abdominal cancer resection surgery (e.g., subsequent to colon resection) in order to provide support to the structure, and to release an amount of the anti-angiogenic factor.

[0693] Within further aspects of the present invention, methods are provided for treating tumor excision sites, comprising administering a polynucleotide, polypeptide, agonist and/or agonist to the resection margins of a tumor subsequent to excision, such that the local recurrence of cancer and the formation of new blood vessels at the site is inhibited. Within one embodiment of the invention, the anti-angiogenic compound is administered directly to the tumor excision site (e.g., applied by swabbing, brushing or otherwise coating the resection margins of the tumor with the anti-angiogenic compound). Alternatively, the anti-angiogenic compounds may be incorporated into known surgical pastes prior to administration. Within particularly preferred embodiments of the invention, the anti-angiogenic compounds are applied after hepatic resections for malignancy, and after neurosurgical operations.

[0694] Within one aspect of the present invention, polynucleotides, polypeptides, agonists and/or agonists may be administered to the resection margin of a wide variety of tumors, including for example, breast, colon, brain and hepatic tumors. For example, within one embodiment of the invention, anti-angiogenic compounds may be administered to the site of a neurological tumor subsequent to excision, such that the formation of new blood vessels at the site are inhibited.

[0695] The polynucleotides, polypeptides, agonists and/or agonists of the present invention may also be administered along with other anti-angiogenic factors. Representative examples of other anti-angiogenic factors include: Anti-Invasive Factor, retinoic acid and derivatives thereof, paclitaxel, Suramin, Tissue Inhibitor of Metalloproteinase-l, Tissue Inhibitor of Metalloproteinase-2, Plasminogen Activator Inhibitor-1, Plasminogen Activator Inhibitor-2, and various forms of the lighter “d group” transition metals.

[0696] Lighter “d group” transition metals include, for example, vanadium, molybdenum, tungsten, titanium, niobium, and tantalum species. Such transition metal species may form transition metal complexes. Suitable complexes of the above-mentioned transition metal species include oxo transition metal complexes.

[0697] Representative examples of vanadium complexes include oxo vanadium complexes such as vanadate and vanadyl complexes. Suitable vanadate complexes include metavanadate and orthovanadate complexes such as, for example, ammonium metavanadate, sodium metavanadate, and sodium orthovanadate. Suitable vanadyl complexes include, for example, vanadyl acetylacetonate and vanadyl sulfate including vanadyl sulfate hydrates such as vanadyl sulfate mono- and trihydrates.

[0698] Representative examples of tungsten and molybdenum complexes also include oxo complexes. Suitable oxo tungsten complexes include tungstate and tungsten oxide complexes. Suitable tungstate complexes include ammonium tungstate, calcium tungstate, sodium tungstate dihydrate, and tungstic acid. Suitable tungsten oxides include tungsten (IV) oxide and tungsten (VI) oxide. Suitable oxo molybdenum complexes include molybdate, molybdenum oxide, and molybdenyl complexes. Suitable molybdate complexes include ammonium molybdate and its hydrates, sodium molybdate and its hydrates, and potassium molybdate and its hydrates. Suitable molybdenum oxides include molybdenum (VI) oxide, molybdenum (VI) oxide, and molybdic acid. Suitable molybdenyl complexes include, for example, molybdenyl acetylacetonate. Other suitable tungsten and molybdenum complexes include hydroxo derivatives derived from, for example, glycerol, tartaric acid, and sugars.

[0699] A wide variety of other anti-angiogenic factors may also be utilized within the context of the present invention. Representative examples include platelet factor 4; protamine sulphate; sulphated chitin derivatives (prepared from queen crab shells), (Murata et al., Cancer Res. 51:22-26 (1991)); Sulphated Polysaccharide Peptidoglycan Complex (SP-PG) (the function of this compound may be enhanced by the presence of steroids such as estrogen, and tamoxifen citrate); Staurosporine; modulators of matrix metabolism, including for example, proline analogs, cishydroxyproline, d,L-3,4-dehydroproline, Thiaproline, alpha,alpha-dipyridyl, aminopropionitrile fumarate; 4-propyl-5-(4-pyridinyl)-2(3H)-oxazolone; Methotrexate; Mitoxantrone; Heparin; Interferons; 2 Macroglobulin-serum; ChIMP-3 (Pavloff et al., J. Bio. Chem. 267:17321-17326 (1992)); Chymostatin (Tomkinson et al., Biochem J. 286:475-480 (1992)); Cyclodextrin Tetradecasulfate; Eponemycin; Camptothecin; Fumagillin (Ingber et al., Nature 348:555-557 (1990)); Gold Sodium Thiomalate (“GST”; Matsubara and Ziff, J. Clin. Invest. 79:1440-1446 (1987)); anticollagenase-serum; alpha2-antiplasmin (Holmes et al., J. Biol. Chem. 262(4):1659-1664 (1987)); Bisantrene (National Cancer Institute); Lobenzarit disodium (N-(2)-carboxyphenyl-4-chloroanthronilic acid disodium or “CCA”; Takeuchi et al., Agents Actions 36:312-316, 1992); Thalidomide; Angostatic steroid; AGM-1470; carboxynaminolmidazole; and metalloproteinase inhibitors such as BB94.

[0700] Musculoskeletal System Disorders

[0701] Polynucleotides, polypeptides, antibodies, and/or agonists or antagonists of the present invention, may be used to treat, prevent, diagnose, and/or prognose disorders of the musculoskeletal system, including but not limited to, disorders of the bone, joints, ligaments, tendons, bursa, muscle, and/or neoplasms and cancers associated with musculoskeletal tissue.

[0702] Diseases or disorders of the bone include, but are not limited to, Albers-Schönberg disease, bowlegs, heel spurs, Köhler's bone disease, knock-knees, Legg-Calvé-Perthes disease, Marfan's syndrome, mucopolysaccharidoses, Osgood-Schlatter disease, osteochondroses, osteochondrodysplasia, osteomyelitis, osteopetroses, osteoporosis (postmenopausal, senile, and juvenile), Paget's disease, Scheuermann's disease, scoliosis, Sever's disease, and patellofemoral stress syndrome.

[0703] Joint diseases or disorders include, but are not limited to, ankylosing spondylitis, Behcet's syndrome, CREST syndrome, Ehlers-Danlos syndrome, infectious arthritis, discoid lupus erythematosus, systemic lupus erythematosus, Lyme disease, osteoarthritis, psoriatic arthritis, relapsing polychondrites, Reiter's syndrome, rheumatoid arthritis (adult and juvenile), scieroderma, and Still's disease.

[0704] Diseases or disorders affecting ligaments, tendons, or bursa include, but are not limited to, ankle sprain, bursitis, posterior Achilles tendon bursitis (Haglund's deformity), anterior Achilles tendon bursitis (Albert's disease), tendinitis, tenosynovitis, poplieus tendinitis, Achilles tendinitis, medial or lateral epicondylitis, rotator cuff tendinitis, spasmodic torticollis, and fibromyalgia syndrome.

[0705] Muscle diseases or disorders include, but are not limited to, Becker's muscular dystrophy, Duchenne's muscular dystrophy, Landouzy-Dejerine muscular dystrophy, Leyden-Möbius muscular dystrophy, Erb's muscular dystrophy, Charcot's joints, dermatomyositis, gout, pseudogout, glycogen storage diseases, Pompe's disease, mitochondrial myopathy, periodic paralysis, polymyalgia rheumatica, polymyositis, Steinert's disease, Thomsen's disease, anterolateral and posteromedial shin splints, posterior femoral muscle strain, and fibromyositis.

[0706] Musculoskeletal tissue may also develop cancers and/or neoplasms that include, but are not limited to, osteochondroma, benign chondroma, chondroblastoma, chondromyxoid fibroma, osteoid osteoma, giant cell tumor, multiple myeloma, osteosarcoma, fibrosarcoma, malignant fibrous histiocytoma, chondrosarcoma, Ewing's tumor, and malignant lymphoma of bone.

[0707] Neural Activity and Neurological Diseases

[0708] The polynucleotides, polypeptides and agonists or antagonists of the invention may be used for the diagnosis and/or treatment of diseases, disorders, damage or injury of the brain and/or nervous system. Nervous system disorders that can be treated with the compositions of the invention (e.g., polypeptides, polynucleotides, and/or agonists or antagonists), include, but are not limited to, nervous system injuries, and diseases or disorders which result in either a disconnection of axons, a diminution or degeneration of neurons, or demyelination. Nervous system lesions which may be treated in a patient (including human and non-human mammalian patients) according to the methods of the invention, include but are not limited to, the following lesions of either the central (including spinal cord, brain) or peripheral nervous systems: (1) ischemic lesions, in which a lack of oxygen in a portion of the nervous system results in neuronal injury or death, including cerebral infarction or ischemia, or spinal cord infarction or ischemia; (2) traumatic lesions, including lesions caused by physical injury or associated with surgery, for example, lesions which sever a portion of the nervous system, or compression injuries; (3) malignant lesions, in which a portion of the nervous system is destroyed or injured by malignant tissue which is either a nervous system associated malignancy or a malignancy derived from non-nervous system tissue; (4) infectious lesions, in which a portion of the nervous system is destroyed or injured as a result of infection, for example, by an abscess or associated with infection by human immunodeficiency virus, herpes zoster, or herpes simplex virus or with Lyme disease, tuberculosis, or syphilis; (5) degenerative lesions, in which a portion of the nervous system is destroyed or injured as a result of a degenerative process including but not limited to, degeneration associated with Parkinson's disease, Alzheimer's disease, Huntington's chorea, or amyotrophic lateral sclerosis (ALS); (6) lesions associated with nutritional diseases or disorders, in which a portion of the nervous system is destroyed or injured by a nutritional disorder or disorder of metabolism including, but not limited to, vitamin B12 deficiency, folic acid deficiency, Wernicke disease, tobacco-alcohol amblyopia, Marchiafava-Bignami disease (primary degeneration of the corpus callosum), and alcoholic cerebellar degeneration; (7) neurological lesions associated with systemic diseases including, but not limited to, diabetes (diabetic neuropathy, Bell's palsy), systemic lupus erythematosus, carcinoma, or sarcoidosis; (8) lesions caused by toxic substances including alcohol, lead, or particular neurotoxins; and (9) demyelinated lesions in which a portion of the nervous system is destroyed or injured by a demyelinating disease including, but not limited to, multiple sclerosis, human immunodeficiency virus-associated myelopathy, transverse myelopathy or various etiologies, progressive multifocal leukoencephalopathy, and central pontine myelinolysis.

[0709] In one embodiment, the polypeptides, polynucleotides, or agonists or antagonists of the invention are used to protect neural cells from the damaging effects of hypoxia. In a further preferred embodiment, the polypeptides, polynucleotides, or agonists or antagonists of the invention are used to protect neural cells from the damaging effects of cerebral hypoxia. According to this embodiment, the compositions of the invention are used to treat or prevent neural cell injury associated with cerebral hypoxia. In one non-exclusive aspect of this embodiment, the polypeptides, polynucleotides, or agonists or antagonists of the invention, are used to treat or prevent neural cell injury associated with cerebral ischemia. In another non-exclusive aspect of this embodiment, the polypeptides, polynucleotides, or agonists or antagonists of the invention are used to treat or prevent neural cell injury associated with cerebral infarction.

[0710] In another preferred embodiment, the polypeptides, polynucleotides, or agonists or antagonists of the invention are used to treat or prevent neural cell injury associated with a stroke. In a specific embodiment, the polypeptides, polynucleotides, or agonists or antagonists of the invention are used to treat or prevent cerebral neural cell injury associated with a stroke.

[0711] In another preferred embodiment, the polypeptides, polynucleotides, or agonists or antagonists of the invention are used to treat or prevent neural cell injury associated with a heart attack. In a specific embodiment, the polypeptides, polynucleotides, or agonists or antagonists of the invention are used to treat or prevent cerebral neural cell injury associated with a heart attack.

[0712] The compositions of the invention which are useful for treating or preventing a nervous system disorder may be selected by testing for biological activity in promoting the survival or differentiation of neurons. For example, and not by way of limitation, compositions of the invention which elicit any of the following effects may be useful according to the invention: (1) increased survival time of neurons in culture either in the presence or absence of hypoxia or hypoxic conditions; (2) increased sprouting of neurons in culture or in vivo; (3) increased production of a neuron-associated molecule in culture or in vivo, e.g., choline acetyltransferase or acetylcholinesterase with respect to motor neurons; or (4) decreased symptoms of neuron dysfunction in vivo. Such effects may be measured by any method known in the art. In preferred, non-limiting embodiments, increased survival of neurons may routinely be measured using a method set forth herein or otherwise known in the art, such as, for example, in Zhang et al., Proc Natl Acad Sci USA 97:3637-42 (2000) or in Arakawa et al., J. Neurosci., 10:3507-15 (1990); increased sprouting of neurons may be detected by methods known in the art, such as, for example, the methods set forth in Pestronk et al., Exp. Neurol., 70:65-82 (1980), or Brown et al., Ann. Rev. Neurosci., 4:17-42 (1981); increased production of neuron-associated molecules may be measured by bioassay, enzymatic assay, antibody binding, Northern blot assay, etc., using techniques known in the art and depending on the molecule to be measured; and motor neuron dysfunction may be measured by assessing the physical manifestation of motor neuron disorder, e.g., weakness, motor neuron conduction velocity, or functional disability.

[0713] In specific embodiments, motor neuron disorders that may be treated according to the invention include, but are not limited to, disorders such as infarction, infection, exposure to toxin, trauma, surgical damage, degenerative disease or malignancy that may affect motor neurons as well as other components of the nervous system, as well as disorders that selectively affect neurons such as amyotrophic lateral sclerosis, and including, but not limited to, progressive spinal muscular atrophy, progressive bulbar palsy, primary lateral sclerosis, infantile and juvenile muscular atrophy, progressive bulbar paralysis of childhood (Fazio-Londe syndrome), poliomyelitis and the post polio syndrome, and Hereditary Motorsensory Neuropathy (Charcot-Marie-Tooth Disease).

[0714] Further, polypeptides or polynucleotides of the invention may play a role in neuronal survival; synapse formation; conductance; neural differentiation, etc. Thus, compositions of the invention (including polynucleotides, polypeptides, and agonists or antagonists) may be used to diagnose and/or treat or prevent diseases or disorders associated with these roles, including, but not limited to, learning and/or cognition disorders. The compositions of the invention may also be useful in the treatment or prevention of neurodegenerative disease states and/or behavioural disorders. Such neurodegenerative disease states and/or behavioral disorders include, but are not limited to, Alzheimer's Disease, Parkinson's Disease, Huntington's Disease, Tourette Syndrome, schizophrenia, mania, dementia, paranoia, obsessive compulsive disorder, panic disorder, learning disabilities, ALS, psychoses, autism, and altered behaviors, including disorders in feeding, sleep patterns, balance, and perception. In addition, compositions of the invention may also play a role in the treatment, prevention and/or detection of developmental disorders associated with the developing embryo, or sexually-linked disorders.

[0715] Additionally, polypeptides, polynucleotides and/or agonists or antagonists of the invention, may be useful in protecting neural cells from diseases, damage, disorders, or injury, associated with cerebrovascular disorders including, but not limited to, carotid artery diseases (e.g., carotid artery thrombosis, carotid stenosis, or Moyamoya Disease), cerebral amyloid angiopathy, cerebral aneurysm, cerebral anoxia, cerebral arteriosclerosis, cerebral arteriovenous malformations, cerebral artery diseases, cerebral embolism and thrombosis (e.g., carotid artery thrombosis, sinus thrombosis, or Wallenberg's Syndrome), cerebral hemorrhage (e.g., epidural or subdural hematoma, or subarachnoid hemorrhage), cerebral infarction, cerebral ischemia (e.g., transient cerebral ischemia, Subclavian Steal Syndrome, or vertebrobasilar insufficiency), vascular dementia (e.g., multi-infarct), leukomalacia, periventricular, and vascular headache (e.g., cluster headache or migraines).

[0716] In accordance with yet a further aspect of the present invention, there is provided a process for utilizing polynucleotides or polypeptides, as well as agonists or antagonists of the present invention, for therapeutic purposes, for example, to stimulate neurological cell proliferation and/or differentiation. Therefore, polynucleotides, polypeptides, agonists and/or antagonists of the invention may be used to treat and/or detect neurologic diseases. Moreover, polynucleotides or polypeptides, or agonists or antagonists of the invention, can be used as a marker or detector of a particular nervous system disease or disorder.

[0717] Examples of neurologic diseases which can be treated or detected with polynucleotides, polypeptides, agonists, and/or antagonists of the present invention include brain diseases, such as metabolic brain diseases which includes phenylketonuria such as maternal phenylketonuria, pyruvate carboxylase deficiency, pyruvate dehydrogenase complex deficiency, Wernicke's Encephalopathy, brain edema, brain neoplasms such as cerebellar neoplasms which include infratentorial neoplasms, cerebral ventricle neoplasms such as choroid plexus neoplasms, hypothalamic neoplasms, supratentorial neoplasms, canavan disease, cerebellar diseases such as cerebellar ataxia which include spinocerebellar degeneration such as ataxia telangiectasia, cerebellar dyssynergia, Friederich's Ataxia, Machado-Joseph Disease, olivopontocerebellar atrophy, cerebellar neoplasms such as infratentorial neoplasms, diffuse cerebral sclerosis such as encephalitis periaxialis, globoid cell leukodystrophy, metachromatic leukodystrophy and subacute sclerosing panencephalitis.

[0718] Additional neurologic diseases which can be treated or detected with polynucleotides, polypeptides, agonists, and/or antagonists of the present invention include cerebrovascular disorders (such as carotid artery diseases which include carotid artery thrombosis, carotid stenosis and Moyamoya Disease), cerebral amyloid angiopathy, cerebral aneurysm, cerebral anoxia, cerebral arteriosclerosis, cerebral arteriovenous malformations, cerebral artery diseases, cerebral embolism and thrombosis such as carotid artery thrombosis, sinus thrombosis and Wallenberg's Syndrome, cerebral hemorrhage such as epidural hematoma, subdural hematoma and subarachnoid hemorrhage, cerebral infarction, cerebral ischemia such as transient cerebral ischemia, Subclavian Steal Syndrome and vertebrobasilar insufficiency, vascular dementia such as multi-infarct dementia, periventricular leukomalacia, vascular headache such as cluster headache and migraine.

[0719] Additional neurologic diseases which can be treated or detected with polynucleotides, polypeptides, agonists, and/or antagonists of the present invention include dementia such as AIDS Dementia Complex, presenile dementia such as Alzheimer's Disease and Creutzfeldt-Jakob Syndrome, senile dementia such as Alzheimer's Disease and progressive supranuclear palsy, vascular dementia such as multi-infarct dementia, encephalitis which include encephalitis periaxialis, viral encephalitis such as epidemic encephalitis, Japanese Encephalitis, St. Louis Encephalitis, tick-borne encephalitis and West Nile Fever, acute disseminated encephalomyelitis, meningoencephalitis such as uveomeningoencephalitic syndrome, Postencephalitic Parkinson Disease and subacute sclerosing panencephalitis, encephalomalacia such as periventricular leukomalacia, epilepsy such as generalized epilepsy which includes infantile spasms, absence epilepsy, myoclonic epilepsy which includes MERRF Syndrome, tonic-clonic epilepsy, partial epilepsy such as complex partial epilepsy, frontal lobe epilepsy and temporal lobe epilepsy, post-traumatic epilepsy, status epilepticus such as Epilepsia Partialis Continua, and Hallervorden-Spatz Syndrome.

[0720] Additional neurologic diseases which can be treated or detected with polynucleotides, polypeptides, agonists, and/or antagonists of the present invention include hydrocephalus such as Dandy-Walker Syndrome and normal pressure hydrocephalus, hypothalamic diseases such as hypothalamic neoplasms, cerebral malaria, narcolepsy which includes cataplexy, bulbar poliomyelitis, cerebri pseudotumor, Rett Syndrome, Reye's Syndrome, thalamic diseases, cerebral toxoplasmosis, intracranial tuberculoma and Zellweger Syndrome, central nervous system infections such as AIDS Dementia Complex, Brain Abscess, subdural empyema, encephalomyelitis such as Equine Encephalomyelitis, Venezuelan Equine Encephalomyelitis, Necrotizing Hemorrhagic Encephalomyelitis, Visna, and cerebral malaria.

[0721] Additional neurologic diseases which can be treated or detected with polynucleotides, polypeptides, agonists, and/or antagonists of the present invention include meningitis such as arachnoiditis, aseptic meningtitis such as viral meningtitis which includes lymphocytic choriomeningitis, Bacterial meningtitis which includes Haemophilus Meningtitis, Listeria Meningtitis, Meningococcal Meningtitis such as Waterhouse-Friderichsen Syndrome, Pneumococcal Meningtitis and meningeal tuberculosis, fungal meningitis such as Cryptococcal Meningtitis, subdural effusion, meningoencephalitis such as uvemeningoencephalitic syndrome, myelitis such as transverse myelitis, neurosyphilis such as tabes dorsalis, poliomyelitis which includes bulbar poliomyelitis and postpoliomyelitis syndrome, prion diseases (such as Creutzfeldt-Jakob Syndrome, Bovine Spongiform Encephalopathy, Gerstmann-Straussler Syndrome, Kuru, Scrapie), and cerebral toxoplasmosis.

[0722] Additional neurologic diseases which can be treated or detected with polynucleotides, polypeptides, agonists, and/or antagonists of the present invention include central nervous system neoplasms such as brain neoplasms that include cerebellar neoplasms such as infratentorial neoplasms, cerebral ventricle neoplasms such as choroid plexus neoplasms, hypothalamic neoplasms and supratentorial neoplasms, meningeal neoplasms, spinal cord neoplasms which include epidural neoplasms, demyelinating diseases such as Canavan Diseases, diffuse cerebral sceloris which includes adrenoleukodystrophy, encephalitis periaxialis, globoid cell leukodystrophy, diffuse cerebral sclerosis such as metachromatic leukodystrophy, allergic encephalomyelitis, necrotizing hemorrhagic encephalomyelitis, progressive multifocal leukoencephalopathy, multiple sclerosis, central pontine myelinolysis, transverse myelitis, neuromyelitis optica, Scrapie, Swayback, Chronic Fatigue Syndrome, Visna, High Pressure Nervous Syndrome, Meningism, spinal cord diseases such as amyotonia congenita, amyotrophic lateral sclerosis, spinal muscular atrophy such as Werdnig-Hoffmann Disease, spinal cord compression, spinal cord neoplasms such as epidural neoplasms, syringomyelia, Tabes Dorsalis, Stiff-Man Syndrome, mental retardation such as Angelman Syndrome, Cri-du-Chat Syndrome, De Lange's Syndrome, Down Syndrome, Gangliosidoses such as gangliosidoses G(M1), Sandhoff Disease, Tay-Sachs Disease, Hartnup Disease, homocystinuria, Laurence-Moon-Biedl Syndrome, Lesch-Nyhan Syndrome, Maple Syrup Urine Disease, mucolipidosis such as fucosidosis, neuronal ceroid-lipofuscinosis, oculocerebrorenal syndrome, phenylketonuria such as maternal phenylketonuria, Prader-Willi Syndrome, Rett Syndrome, Rubinstein-Taybi Syndrome, Tuberous Sclerosis, WAGR Syndrome, nervous system abnormalities such as holoprosencephaly, neural tube defects such as anencephaly which includes hydrangencephaly, Arnold-Chairi Deformity, encephalocele, meningocele, meningomyelocele, spinal dysraphism such as spina bifida cystica and spina bifida occulta.

[0723] Additional neurologic diseases which can be treated or detected with polynucleotides, polypeptides, agonists, and/or antagonists of the present invention include hereditary motor and sensory neuropathies which include Charcot-Marie Disease, Hereditary optic atrophy, Refsum's Disease, hereditary spastic paraplegia, Werdnig-Hoffmann Disease, Hereditary Sensory and Autonomic Neuropathies such as Congenital Analgesia and Familial Dysautonomia, Neurologic manifestations (such as agnosia that include Gerstmann's Syndrome, Amnesia such as retrograde amnesia, apraxia, neurogenic bladder, cataplexy, communicative disorders such as hearing disorders that includes deafness, partial hearing loss, loudness recruitment and tinnitus, language disorders such as aphasia which include agraphia, anomia, broca aphasia, and Wernicke Aphasia, Dyslexia such as Acquired Dyslexia, language development disorders, speech disorders such as aphasia which includes anomia, broca aphasia and Wernicke Aphasia, articulation disorders, communicative disorders such as speech disorders which include dysarthria, echolalia, mutism and stuttering, voice disorders such as aphonia and hoarseness, decerebrate state, delirium, fasciculation, hallucinations, meningism, movement disorders such as angelman syndrome, ataxia, athetosis, chorea, dystonia, hypokinesia, muscle hypotonia, myoclonus, tic, torticollis and tremor, muscle hypertonia such as muscle rigidity such as stiff-man syndrome, muscle spasticity, paralysis such as facial paralysis which includes Herpes Zoster Oticus, Gastroparesis, Hemiplegia, ophthalmoplegia such as diplopia, Duane's Syndrome, Homer's Syndrome, Chronic progressive external ophthalmoplegia such as Kearns Syndrome, Bulbar Paralysis, Tropical Spastic Paraparesis, Paraplegia such as Brown-Sequard Syndrome, quadriplegia, respiratory paralysis and vocal cord paralysis, paresis, phantom limb, taste disorders such as ageusia and dysgeusia, vision disorders such as amblyopia, blindness, color vision defects, diplopia, hemianopsia, scotoma and subnormal vision, sleep disorders such as hypersomnia which includes Kleine-Levin Syndrome, insomnia, and somnambulism, spasm such as trismus, unconsciousness such as coma, persistent vegetative state and syncope and vertigo, neuromuscular diseases such as amyotonia congenita, amyotrophic lateral sclerosis, Lambert-Eaton Myasthenic Syndrome, motor neuron disease, muscular atrophy such as spinal muscular atrophy, Charcot-Marie Disease and Werdnig-Hoffmann Disease, Postpoliomyelitis Syndrome, Muscular Dystrophy, Myasthenia Gravis, Myotonia Atrophica, Myotonia Confenita, Nemaline Myopathy, Familial Periodic Paralysis, Multiplex Paramyloclonus, Tropical Spastic Paraparesis and Stiff-Man Syndrome, peripheral nervous system diseases such as acrodynia, amyloid neuropathies, autonomic nervous system diseases such as Adie's Syndrome, Barre-Lieou Syndrome, Familial Dysautonomia, Homer's Syndrome, Reflex Sympathetic Dystrophy and Shy-Drager Syndrome, Cranial Nerve Diseases such as Acoustic Nerve Diseases such as Acoustic Neuroma which includes Neurofibromatosis 2, Facial Nerve Diseases such as Facial Neuralgia, Melkersson-Rosenthal Syndrome, ocular motility disorders which includes amblyopia, nystagmus, oculomotor nerve paralysis, ophthalmoplegia such as Duane's Syndrome, Horner's Syndrome, Chronic Progressive External Ophthalmoplegia which includes Kearns Syndrome, Strabismus such as Esotropia and Exotropia, Oculomotor Nerve Paralysis, Optic Nerve Diseases such as Optic Atrophy which includes Hereditary Optic Atrophy, Optic Disk Drusen, Optic Neuritis such as Neuromyelitis Optica, Papilledema, Trigeminal Neuralgia, Vocal Cord Paralysis, Demyelinating Diseases such as Neuromyelitis Optica and Swayback, and Diabetic neuropathies such as diabetic foot.

[0724] Additional neurologic diseases which can be treated or detected with polynucleotides, polypeptides, agonists, and/or antagonists of the present invention include nerve compression syndromes such as carpal tunnel syndrome, tarsal tunnel syndrome, thoracic outlet syndrome such as cervical rib syndrome, ulnar nerve compression syndrome, neuralgia such as causalgia, cervico-brachial neuralgia, facial neuralgia and trigeminal neuralgia, neuritis such as experimental allergic neuritis, optic neuritis, polyneuritis, polyradiculoneuritis and radiculities such as polyradiculitis, hereditary motor and sensory neuropathies such as Charcot-Marie Disease, Hereditary Optic Atrophy, Refsum's Disease, Hereditary Spastic Paraplegia and Werdnig-Hoffmann Disease, Hereditary Sensory and Autonomic Neuropathies which include Congenital Analgesia and Familial Dysautonomia, POEMS Syndrome, Sciatica, Gustatory Sweating and Tetany).

[0725] Endocrine Disorders

[0726] Polynucleotides or polypeptides, or agonists or antagonists of the present invention, may be used to treat, prevent, diagnose, and/or prognose disorders and/or diseases related to hormone imbalance, and/or disorders or diseases of the endocrine system.

[0727] Hormones secreted by the glands of the endocrine system control physical growth, sexual function, metabolism, and other functions. Disorders may be classified in two ways: disturbances in the production of hormones, and the inability of tissues to respond to hormones. The etiology of these hormone imbalance or endocrine system diseases, disorders or conditions may be genetic, somatic, such as cancer and some autoimmune diseases, acquired (e.g., by chemotherapy, injury or toxins), or infectious. Moreover, polynucleotides, polypeptides, antibodies, and/or agonists or antagonists of the present invention can be used as a marker or detector of a particular disease or disorder related to the endocrine system and/or hormone imbalance.

[0728] Endocrine system and/or hormone imbalance and/or diseases encompass disorders of uterine motility including, but not limited to: complications with pregnancy and labor (e.g., pre-term labor, post-term pregnancy, spontaneous abortion, and slow or stopped labor); and disorders and/or diseases of the menstrual cycle (e.g., dysmenorrhea and endometriosis).

[0729] Endocrine system and/or hormone imbalance disorders and/or diseases include disorders and/or diseases of the pancreas, such as, for example, diabetes mellitus, diabetes insipidus, congenital pancreatic agenesis, pheochromocytoma—islet cell tumor syndrome; disorders and/or diseases of the adrenal glands such as, for example, Addison's Disease, corticosteroid deficiency, virilizing disease, hirsutism, Cushing's Syndrome, hyperaldosteronism, pheochromocytoma; disorders and/or diseases of the pituitary gland, such as, for example, hyperpituitarism, hypopituitarism, pituitary dwarfism, pituitary adenoma, panhypopituitarism, acromegaly, gigantism; disorders and/or diseases of the thyroid, including but not limited to, hyperthyroidism, hypothyroidism, Plummer's disease, Graves' disease (toxic diffuse goiter), toxic nodular goiter, thyroiditis (Hashimoto's thyroiditis, subacute granulomatous thyroiditis, and silent lymphocytic thyroiditis), Pendred's syndrome, myxedema, cretinism, thyrotoxicosis, thyroid hormone coupling defect, thymic aplasia, Hurthle cell tumours of the thyroid, thyroid cancer, thyroid carcinoma, Medullary thyroid carcinoma; disorders and/or diseases of the parathyroid, such as, for example, hyperparathyroidism, hypoparathyroidism; disorders and/or diseases of the hypothalamus.

[0730] In addition, endocrine system and/or hormone imbalance disorders and/or diseases may also include disorders and/or diseases of the testes or ovaries, including cancer. Other disorders and/or diseases of the testes or ovaries further include, for example, ovarian cancer, polycystic ovary syndrome, Klinefelter's syndrome, vanishing testes syndrome (bilateral anorchia), congenital absence of Leydig's cells, cryptorchidism, Noonan's syndrome, myotonic dystrophy, capillary haemangioma of the testis (benign), neoplasias of the testis and neo-testis.

[0731] Moreover, endocrine system and/or hormone imbalance disorders and/or diseases may also include disorders and/or diseases such as, for example, polyglandular deficiency syndromes, pheochromocytoma, neuroblastoma, multiple Endocrine neoplasia, and disorders and/or cancers of endocrine tissues.

[0732] In another embodiment, a polypeptide of the invention, or polynucleotides, antibodies, agonists, or antagonists corresponding to that polypeptide, may be used to diagnose, prognose, prevent, and/or treat endocrine diseases and/or disorders associated with the tissue(s) in which the polypeptide of the invention is expressed, including one, two, three, four, five, or more tissues disclosed in Table 1A, column 7 (Tissue Distribution Library Code).

[0733] Gastrointestinal Disorders

[0734] Polynucleotides or potypeptides, or agonists or antagonists of the present invention, may be used to treat, prevent, diagnose, and/or prognose gastrointestinal disorders, including inflammatory diseases and/or conditions, infections, cancers (e.g., intestinal neoplasms (carcinoid tumor of the small intestine, non-Hodgkin's lymphoma of the small intestine, small bowl lymphoma)), and ulcers, such as peptic ulcers.

[0735] Gastrointestinal disorders include dysphagia, odynophagia, inflammation of the esophagus, peptic esophagitis, gastric reflux, submucosal fibrosis and stricturing, Mallory-Weiss lesions, leiomyomas, lipomas, epidermal cancers, adeoncarcinomas, gastric retention disorders, gastroenteritis, gastric atrophy, gastric/stomach cancers, polyps of the stomach, autoimmune disorders such as pernicious anemia, pyloric stenosis, gastritis (bacterial, viral, eosinophilic, stress-induced, chronic erosive, atrophic, plasma cell, and Menetrier's), and peritoneal diseases (e.g., chyloperioneum, hemoperitoneum, mesenteric cyst, mesenteric lymphadenitis, mesenteric vascular occlusion, panniculitis, neoplasms, peritonitis, pneumoperitoneum, bubphrenic abscess).

[0736] Gastrointestinal disorders also include disorders associated with the small intestine, such as malabsorption syndromes, distension, irritable bowel syndrome, sugar intolerance, celiac disease, duodenal ulcers, duodenitis, tropical sprue, Whipple's disease, intestinal lymphangiectasia, Crohn's disease, appendicitis, obstructions of the ileum, Meckel's diverticulum, multiple diverticula, failure of complete rotation of the small and large intestine, lymphoma, and bacterial and parasitic diseases (such as Traveler's diarrhea, typhoid and paratyphoid, cholera, infection by Roundworms (Ascariasis lumbricoides), Hookworms (Ancylostoma duodenale), Threadworms (Enterobius vermicularis), Tapeworms (Taenia saginata, Echinococcus granulosus, Diphyllobothrium spp., and T. solium).

[0737] Liver diseases and/or disorders include intrahepatic cholestasis (alagille syndrome, biliary liver cirrhosis), fatty liver (alcoholic fatty liver, reye syndrome), hepatic vein thrombosis, hepatolentricular degeneration, hepatomegaly, hepatopulmonary syndrome, hepatorenal syndrome, portal hypertension (esophageal and gastric varices), liver abscess (amebic liver abscess), liver cirrhosis (alcoholic, biliary and experimental), alcoholic liver diseases (fatty liver, hepatitis, cirrhosis), parasitic (hepatic echinococcosis, fascioliasis, amebic liver abscess), jaundice (hemolytic, hepatocellular, and cholestatic), cholestasis, portal hypertension, liver enlargement, ascites, hepatitis (alcoholic hepatitis, animal hepatitis, chronic hepatitis (autoimmune, hepatitis B, hepatitis C, hepatitis D, drug induced), toxic hepatitis, viral human hepatitis (hepatitis A, hepatitis B, hepatitis -C, hepatitis D, hepatitis E), Wilson's disease, granulomatous hepatitis, secondary biliary cirrhosis, hepatic encephalopathy, portal hypertension, varices, hepatic encephalopathy, primary biliary cirrhosis, primary sclerosing cholangitis, hepatocellular adenoma, hemangiomas, bile stones, liver failure (hepatic encephalopathy, acute liver failure), and liver neoplasms (angiomyolipoma, calcified liver metastases, cystic liver metastases, epithelial tumors, fibrolamellar hepatocarcinoma, focal nodular hyperplasia, hepatic adenoma, hepatobiliary cystadenoma, hepatoblastoma, hepatocellular carcinoma, hepatoma, liver cancer, liver hemangioendothelioma, mesenchymal hamartoma, mesenchymal tumors of liver, nodular regenerative hyperplasia, benign liver tumors (Hepatic cysts [Simple cysts, Polycystic liver disease, Hepatobiliary cystadenoma, Choledochal cyst], Mesenchymal tumors [Mesenchymal hamartoma, Infantile hemangioendothelioma, Hemangioma, Peliosis hepatis, Lipomas, Inflammatory pseudotumor, Miscellaneous], Epithelial tumors [Bile duct epithelium (Bile duct hamartoma, Bile duct adenoma), Hepatocyte (Adenoma, Focal nodular hyperplasia, Nodular regenerative hyperplasia)], malignant liver tumors [hepatocellular, hepatoblastoma, hepatocellular carcinoma, cholangiocellular, cholangiocarcinoma, cystadenocarcinoma, tumors of blood vessels, angiosarcoma, Karposi's sarcoma, hemangioendothelioma, other tumors, embryonal sarcoma, fibrosarcoma, leiomyosarcoma, rhabdomyosarcoma, carcinosarcoma, teratoma, carcinoid, squamous carcinoma, primary lymphoma]), peliosis hepatis, erythrohepatic porphyria, hepatic porphyria (acute intermittent porphyria, porphyria cutanea tarda), Zellweger syndrome).

[0738] Pancreatic diseases and/or disorders include acute pancreatitis, chronic pancreatitis (acute necrotizing pancreatitis, alcoholic pancreatitis), neoplasms (adenocarcinoma of the pancreas, cystadenocarcinoma, insulinoma, gastrinoma, and glucagonoma, cystic neoplasms, islet-cell tumors, pancreoblastoma), and other pancreatic diseases (e.g., cystic fibrosis, cyst (pancreatic pseudocyst, pancreatic fistula, insufficiency)).

[0739] Gallbladder diseases include gallstones (cholelithiasis and choledocholithiasis), postcholecystectomy syndrome, diverticulosis of the gallbladder, acute cholecystitis, chronic cholecystitis, bile duct tumors, and mucocele.

[0740] Diseases and/or disorders of the large intestine include antibiotic-associated colitis, diverticulitis, ulcerative colitis, acquired megacolon, abscesses, fungal and bacterial infections, anorectal disorders (e.g., fissures, hemorrhoids), colonic diseases (colitis, colonic neoplasms [colon cancer, adenomatous colon polyps (e.g., villous adenoma), colon carcinoma, colorectal cancer], colonic diverticulitis, colonic diverticulosis, megacolon [Hirschsprung disease, toxic megacolon]; sigmoid diseases [proctocolitis, sigmoin neoplasms]), constipation, Crohn's disease, diarrhea (infantile diarrhea, dysentery), duodenal diseases (duodenal neoplasms, duodenal obstruction, duodenal ulcer, duodenitis), enteritis (enterocolitis), HIV enteropathy, ileal diseases (ileal neoplasms, ileitis), immunoproliferative small intestinal disease, inflammatory bowel disease (ulcerative colitis, Crohn's disease), intestinal atresia, parasitic diseases (anisakiasis, balantidiasis, blastocystis infections, cryptosporidiosis, dientamoebiasis, amebic dysentery, giardiasis), intestinal fistula (rectal fistula), intestinal neoplasms (cecal neoplasms, colonic neoplasms, duodenal neoplasms, ileal neoplasms, intestinal polyps, jejunal neoplasms, rectal neoplasms), intestinal obstruction (afferent loop syndrome, duodenal obstruction, impacted feces, intestinal pseudo-obstruction [cecal volvulus], intussusception), intestinal perforation, intestinal polyps (colonic polyps, gardner syndrome, peutz-jeghers syndrome), jejunal diseases (jejunal neoplasms), malabsorption syndromes (blind loop syndrome, celiac disease, lactose intolerance, short bowl syndrome, tropical sprue, whipple's disease), mesenteric vascular occlusion, pneumatosis cystoides intestinalis, protein-losing enteropathies (intestinal lymphagiectasis), rectal diseases (anus diseases, fecal incontinence, hemorrhoids, proctitis, rectal fistula, rectal prolapse, rectocele), peptic ulcer (duodenal ulcer, peptic esophagitis, hemorrhage, perforation, stomach ulcer, Zollinger-Ellison syndrome), postgastrectomy syndromes (dumping, syndrome), stomach diseases (e.g., achlorhydria, duodenogastric reflux (bile reflux), gastric antral vascular ectasia, gastric fistula, gastric outlet obstruction, gastritis (atrophic or hypertrophic), gastroparesis, stomach dilatation, stomach diverticulum, stomach neoplasms (gastric cancer, gastric polyps, gastric adenocarcinoma, hyperplastic gastric polyp), stomach rupture, stomach ulcer, stomach volvulus), tuberculosis, visceroptosis, vomiting (e.g., hematemesis, hyperemesis gravidarum, postoperative nausea and vomiting) and hemorrhagic colitis.

[0741] Further diseases and/or disorders of the gastrointestinal system include biliary tract diseases, such as, gastroschisis, fistula (e.g., biliary fistula, esophageal fistula, gastric fistula, intestinal fistula, pancreatic fistula), neoplasms (e.g., biliary tract neoplasms, esophageal neoplasms, such as adenocarcinoma of the esophagus, esophageal squamous cell carcinoma, gastrointestinal neoplasms, pancreatic neoplasms, such as adenocarcinoma of the pancreas, mucinous cystic neoplasm of the pancreas, pancreatic cystic neoplasms, pancreatoblastoma, and peritoneal neoplasms), esophageal disease (e.g., bullous diseases, candidiasis, glycogenic acanthosis, ulceration, barrett esophagus varices, atresia, cyst, diverticulum (e.g., Zenker's diverticulum), fistula (e.g., tracheoesophageal fistula), motility disorders (e.g., CREST syndrome, deglutition disorders, achalasia, spasm, gastroesophageal reflux), neoplasms, perforation (e.g., Boerhaave syndrome, Mallory-Weiss syndrome), stenosis, esophagitis, diaphragmatic hernia (e.g., hiatal hernia); gastrointestinal diseases, such as, gastroenteritis (e.g., cholera morbus, norwalk virus infection), hemorrhage (e.g., hematemesis, melena, peptic ulcer hemorrhage), stomach neoplasms (gastric cancer, gastric polyps, gastric adenocarcinoma, stomach cancer)), hernia (e.g., congenital diaphragmatic hernia, femoral hernia, inguinal hernia, obturator hernia, umbilical hernia, ventral hernia), and intestinal diseases (e.g., cecal diseases (appendicitis, cecal neoplasms)).

[0742] Developmental and Inherited Disorders

[0743] Polynuceotides or polypeptides, or agonists or antagonists of the present invention may be used to treat, prevent, diagnose, and/or prognose diseases associated with mixed fetal tissues, including, but not limited to, developmental and inherited disorders or defects of the nervous system, musculoskelelal system, execretory system, cardiovascular system, hematopoietic system, gastrointestinal system, reproductive system, and respiratory system. Compositions of the present invention may also be used to treat, prevent, diagnose, and/or prognose developmental and inherited disorders or defects associated with, but not limited to, skin, hair, visual, and auditory tissues, metabolism. Additionally, the compositions of the invention may be useful in the diagnosis, treatment, and/or prevention of disorders or diseases associated with, but not limited to, chromosomal or genetic abnormalities and hyperproliferation or neoplasia.

[0744] Disorders or defects of the nervous system associated with developmental or inherited abnormalities that may be diagnosed, treated, and/or prevented with the compostions of the invention include, but are not limited to, adrenoleukodystrophy, agenesis of corpus callosum, Alexander disease, anencephaly, Angelman syndrome, Arnold-Chiari deformity, Batten disease, Canavan disease, cephalic disorders, Charcot-Marie-Tooth disease, encephalocele, Friedreich's ataxia, Gaucher's disease, Gorlin syndrome, Hallervorden-Spatz disease, hereditary spastic paraplegia, Huntington disease, hydranencephaly, hydrocephalus, Joubert syndrome, Lesch-Nyhan syndrome, leukodystrophy, Menkes disease, microcephaly, Niemann-Pick Type C1, neurofibromatosis, porencephaly, progeria, proteus syndrome, Refsum disease, spina bifida, Sturge-Weber syndrome, Tay-Sachs disease, tuberous sclerosis, and von Hippel-Lindau disease.

[0745] Developmental and inherited disorders resulting in disorders or defects of the musculoskeletal system that may be diagnosed, treated, and/or prevented with the compositions of the invention include, but are not limited to, achondroplasia, atlanto-occipital fusion, arthrogryposis mulitplex congenita, autosomal recessive muscular dystrophy, Becker's muscular dystrophy, cerebral palsy, choanal atresia, cleft lip, cleft palate, clubfoot, congenital amputation, congenital dislocation of the hip, congenital torticollis, congenital scoliosis, dopa-repsonsive dystonia, Duchenne muscular dystrophy, early-onset generalized dystonia, femoral torsion, Gorlin syndrome, hypophosphatasia, Klippel-Feil syndrome, knee dislocation, myoclonic dystonia, myotonic dystrophy, nail-patella syndrome, osteogenesis imperfecta, paroxysmal dystonia, progeria, prune-belly syndrome, rapid-onset dystonia parkinsonism, scolosis, syndactyly, Treacher Collins' syndrome, velocardiofacial syndrome, and X-linked dystonia-parkinsonism.

[0746] Developmental or hereditary disorders or defects of the excretory system that may be diagnosed, treated, and/or prevented with the compositions of the invention include, but are not limited to, Alport's syndrome, Bartter's syndrome, bladder diverticula, bladder exstrophy, cystinuria, epispadias, Fanconi's syndrome, Hartnup disease, horseshoe kidney, hypospadias, kidney agenesis, kidney ectopia, kidney malrotation, Liddle's syndrome, medullary cystic disease, medullary sponge, multicystic kidney, kidney polycystic kidney disease, nail-patella syndrome, Potter's syndrome, urinary tract flow obstruction, vitamin D-resistant rickets, and Wilm's tumor.

[0747] Cardiovascular disorders or defects of developmental or hereditary origin that may be diagnosed, treated, and/or prevented with the compositions of the inventtion include, but are not limited to, aortic valve stenosis, atrial septal defects, artioventricular (A-V) canal defect, bicuspid aortic valve, coarctation or the aorta, dextrocardia, Ebstein's anomaly, Eisenmenger's complex, hypoplastic left heart syndrome, Marfan syndrome, patent ductus arteriosus, progeria, pulmonary atresia, pulmonary valve stenosis, subaortic stenosis, tetralogy of fallot, total anomalous pulmonary venous (P-V) connection, transposition of the great arteries, tricuspid atresia, truncus arteriosus, ventricular septal defects. Developmental or inherited disorders resulting in disorders involving the hematopoietic system that may be diagnosed, treated, and/or prevented with the compositions of the invention include, but not limited to, Bemard-Soulier syndrome, Chediak-Higashi syndrome, hemophilia, Hermansky-Pudlak syndrome, sickle cell anemia, storage pool disease, thromboxane A2 dysfunction, thrombasthenia, and von Willebrand's disease.

[0748] The compositions of the invention may also be used to diagnose, treat, and/or prevent developmental and inherited disorders resulting in disorders or defects of the gastrointestinal system, including, but not limited to, anal atresia, biliary atresia, esophageal atresia, diaphragmatic hernia, Hirschsprung's disease, Meckel's diverticulum, oligohydramnios, omphalocele, polyhydramnios, porphyria, situs inversus viscera. Developmental or inherited disorders resulting in metabolic disorders that may be diagnosed, treated, and/or prevented with the compositions of the invention include, but are not limited to, alpha-1 antitrypsin deficiency, cystic fibrosis, hemochromatosis, lysosomal storage disease, phenylketonuria, Wilson's disease, and Zellweger syndrome.

[0749] Disorders of the reproductive system that are developmentally or hereditary related that may also be diagnosed, treated, and/or prevented with the compositions of the invention include, but are not limited to, androgen insensitivity syndrome, ambiguous genitalia, autosomal sex reversal, congenital adreneal hyperplasia, gonadoblastoma, ovarian germ cell cancer, pseudohermphroditism, true hermaphroditism, undescended testis, XX male syndrome, and XY female type gonadal dysgenesis. The compositions of the invention may also be used to diagnose, treat, and/or prevent developmental or inherited respiratory defects including, but not limited to, askin tumor, azygos lobe, congenital diaphragmatic hernia, congenital lobar emphysema, cystic adenomatoid malformation, lobar emphysema, hyaline membrane disease, and pectus excavatum.

[0750] Developmental or inherited disorders may also result from chromosomal or genetic aberration that may be diagnosed, treated, and/or prevented with the compositions of the invention including, but not limited to, 4p-syndrome, cri du chat syndrome, Digeorge syndrome, Down's syndrome, Edward's syndrome, fragile X syndrome, Klinefelter's syndrome, Patau's syndrome, Prader-Willi syndrome, progeria, Turner's syndrome, triple X syndrome, and XYY syndrome. Other developmental disorders that can be diagnosed, treated, and/or prevented with the compositions of the invention, include, but are not limited to, fetal alcohol syndrome, and can be caused by environmental factors surrounding the developing fetus.

[0751] The compositions of the invention may further be able to be used to diagnose, treat, and/or prevent errors in development or a genetic disposition that may result in hyperproliferative disorders or neoplasms, including, but not limited to, acute childhood lymphoblastic leukemia, askin tumor, Beckwith-Wiedemann syndrome, childhood acute myeloid leukemia, childhood brain stem glioma, childhood cerebellar astrocytoma, childhood extracranial germ cell tumors childhood (primary), gonadoblastoma, hepatocellular cancer, childhood Hodgkin's disease, childhood Hodgkin's lymphoma, childhood hypothalamic and visual pathway glioma, childhood (primary) liver cancer, childhood lymphoblastic leukemia, childhood medulloblastoma, childhood non-Hodgkin's lymphoma, childhood pineal and supratentorial primitive neuroectodermal tumors, childhood primary liver cancer, childhood rhabdomyosarcoma, childhood soft tissue sarcoma, Gorlin syndrome, familial multiple endrocrine neoplasia type I, neuroblastoma, ovarian germ cell cancer, pheochromocytoma, retinoblastoma, and Wilm's tumor.

[0752] Polypeptides may be administered using any method known in the art, including, but not limited to, direct needle injection at the delivery site, intravenous injection, topical administration, catheter infusion, biolistic injectors, particle accelerators, gelfoam sponge depots, other commercially available depot materials, osmotic pumps, oral or suppositorial solid pharmaceutical formulations, decanting or topical applications during surgery, aerosol delivery. Such methods are known in the art. Polypeptides may be administered as part of a Therapeutic, described in more detail below. Methods of delivering polynucleotides are described in more detail herein.

[0753] Diseases at the Cellular Level

[0754] Diseases associated with increased cell survival or the inhibition of apoptosis that could be treated, prevented, diagnosed and/or prognosed using polynucleotides or polypeptides, as well as antagonists or agonists of the present invention, include cancers (such as follicular lymphomas, carcinomas with p53 mutations, and hormone-dependent tumors, including, but not limited to colon cancer, cardiac tumors, pancreatic cancer, melanoma, retinoblastoma, glioblastoma, lung cancer, intestinal cancer, testicular cancer, stomach cancer, neuroblastoma, myxoma, myoma, lymphoma, endothelioma, osteoblastoma, osteoclastoma, osteosarcoma, chondrosarcoma, adenoma, breast cancer, prostate cancer, Kaposi's sarcoma and ovarian cancer); autoimmune disorders (such as, multiple sclerosis, Sjogren's syndrome, Hashimoto's thyroiditis, biliary cirrhosis, Behcet's disease, Crohn's disease, polymyositis, systemic lupus erythematosus and immune-related glomerulonephritis and rheumatoid arthritis) and viral infections (such as herpes viruses, pox viruses and adenoviruses), inflammation, graft v. host disease, acute graft rejection, and chronic graft rejection.

[0755] In preferred embodiments, polynucleotides, potypeptides, and/or antagonists of the invention are used to inhibit growth, progression, and/or metastasis of cancers, in particular those [listed above] involving ovarian and/or breast cancer tissues.

[0756] Additional diseases or conditions associated with increased cell survival that could be treated or detected by polynucleotides or polypeptides, or agonists or antagonists of the present invention include, but are not limited to, progression, and/or metastases of malignancies and related disorders such as leukemia (including acute leukemias (e.g., acute lymphocytic leukemia, acute myelocytic leukemia (including myeloblastic, promyelocytic, myelomonocytic, monocytic, and erythroleukemia)) and chronic leukemias (e.g., chronic myelocytic (granulocytic) leukemia and chronic lymphocytic leukemia)), polycythemia vera, lymphomas (e.g., Hodgkin's disease and non-Hodgkin's disease), multiple myeloma, Waldenstrom's macroglobulinemia, heavy chain disease, and solid tumors including, but not limited to, sarcomas and carcinomas such as fibrosarcoma, myxosarcoma, liposarcoma, chondrosarcoma, osteogenic sarcoma, chordoma, angiosarcoma, endotheliosarcoma, lymphangiosarcoma, lymphangioendotheliosarcoma, synovioma, mesothelioma, Ewing's tumor, leiomyosarcoma, rhabdomyosarcoma, colon carcinoma, pancreatic cancer, breast cancer, ovarian cancer, prostate cancer, squamous cell carcinoma, basal cell carcinoma, adenocarcinoma, sweat gland carcinoma, sebaceous gland carcinoma, papillary carcinoma, papillary adenocarcinomas, cystadenocarcinoma, medullary carcinoma, bronchogenic carcinoma, renal cell carcinoma, hepatoma, bile duct carcinoma, choriocarcinoma, seminoma, embryonal carcinoma, Wilm's tumor, cervical cancer, testicular tumor, lung carcinoma, small cell lung carcinoma, bladder carcinoma, epithelial carcinoma, glioma, astrocytoma, medulloblastoma, craniopharyngioma, ependymoma, pinealoma, hemangioblastoma, acoustic neuroma, oligodendroglioma, menangioma, melanoma, neuroblastoma, and retinoblastoma.

[0757] Diseases associated with increased apoptosis that could be treated, prevented, diagnosted, and/or prognosed using polynucleotides or polypeptides, as well as agonists or antagonists of the present invention, include, but are not limited to, AIDS; neurodegenerative disorders (such as Alzheimer's disease, Parkinson's disease, Amyotrophic lateral sclerosis, Retinitis pigmentosa, Cerebellar degeneration and brain tumor or prior associated disease); autoimmune disorders (such as, multiple sclerosis, Sjogren's syndrome, Hashimoto's thyroiditis, biliary cirrhosis, Behcet's disease, Crohn's disease, polymyositis, systemic lupus erythematosus and immune-related glomerulonephritis and rheumatoid arthritis) myelodysplastic syndromes (such as aplastic anemia), graft v. host disease, ischemic injury (such as that caused by myocardial infarction, stroke and reperfusion injury), liver injury (e.g., hepatitis related liver injury, ischemia/reperfusion injury, cholestosis (bile duct injury) and liver cancer); toxin-induced liver disease (such as that caused by alcohol), septic shock, cachexia and anorexia.

[0758] Wound Healing and Epithelial Cell Proliferation

[0759] In accordance with yet a further aspect of the present invention, there is provided a process for utilizing polynucleotides or polypeptides, as well as agonists or antagonists of the present invention, for therapeutic purposes, for example, to stimulate epithelial cell proliferation and basal keratinocytes for the purpose of wound healing, and to stimulate hair follicle production and healing of dermal wounds. Polynucleotides or polypeptides, as well as agonists or antagonists of the present invention, may be clinically useful in stimulating wound healing including surgical wounds, excisional wounds, deep wounds involving damage of the dermis and epidermis, eye tissue wounds, dental tissue wounds, oral cavity wounds, diabetic ulcers, dermal ulcers, cubitus ulcers, arterial ulcers, venous stasis ulcers, burns resulting from heat exposure or chemicals, and other abnormal wound healing conditions such as uremia, malnutrition, vitamin deficiencies and complications associated with systemic treatment with steroids, radiation therapy and antineoplastic drugs and antimetabolites. Polynucleotides or polypeptides, as well as agonists or antagonists of the present invention, could be used to promote dermal reestablishment subsequent to dermal loss.

[0760] Polynucleotides or polypeptides, as well as agonists or antagonists of the present invention, could be used to increase the adherence of skin grafts to a wound bed and to stimulate re-epithelialization from the wound bed. The following are types of grafts that polynucleotides or polypeptides, agonists or antagonists of the present invention, could be used to increase adherence to a wound bed: autografts, artificial skin, allografts, autodermic graft, autoepdermic grafts, avacular grafts, Blair-Brown grafts, bone graft, brephoplastic grafts, cutis graft, delayed graft, dermic graft, epidermic graft, fascia graft, full thickness graft, heterologous graft, xenograft, homologous graft, hyperplastic graft, lamellar graft, mesh graft, mucosal graft, Ollier-Thiersch graft, omenpal graft, patch graft, pedicle graft, penetrating graft, split skin graft, thick split graft. Polynucleotides or polypeptides, as well as agonists or antagonists of the present invention, can be used to promote skin strength and to improve the appearance of aged skin.

[0761] It is believed that polynucleotides or polypeptides, as well as agonists or antagonists of the present invention, will also produce changes in hepatocyte proliferation, and epithelial cell proliferation in the lung, breast, pancreas, stomach, small intestine, and large intestine. Polynucleotides or polypeptides, as well as agonists or antagonists of the present invention, could promote proliferation of epithelial cells such as sebocytes, hair follicles, hepatocytes, type II pneumocytes, mucin-producing goblet cells, and other epithelial cells and their progenitors contained within the skin, lung, liver, and gastrointestinal tract. Polynucleotides or polypeptides, agonists or antagonists of the present invention, may promote proliferation of endothelial cells, keratinocytes, and basal keratinocytes.

[0762] Polynucleotides or polypeptides, as well as agonists or antagonists of the present invention, could also be used to reduce the side effects of gut toxicity that result from radiation, chemotherapy treatments or viral infections. Polynucleotides or polypeptides, as well as agonists or antagonists of the present invention, may have a cytoprotective effect on the small intestine mucosa. Polynucleotides or polypeptides, as well as agonists or antagonists of the present invention, may also stimulate healing of mucositis (mouth ulcers) that result from chemotherapy and viral infections.

[0763] Polynucleotides or polypeptides, as well as agonists or antagonists of the present invention, could further be used in full regeneration of skin in full and partial thickness skin defects, including burns, (i.e., repopulation of hair follicles, sweat glands, and sebaceous glands), treatment of other skin defects such as psoriasis. Polynucleotides or polypeptides, as well as agonists or antagonists of the present invention, could be used to treat epidermolysis bullosa, a defect in adherence of the epidermis to the underlying dermis which results in frequent, open and painful blisters by accelerating reepithelialization of these lesions. Polynucleotides or polypeptides, as well as agonists or antagonists of the present invention, could also be used to treat gastric and doudenal ulcers and help heal by scar formation of the mucosal lining and regeneration of glandular mucosa and duodenal mucosal lining more rapidly. Inflammatory bowel diseases, such as Crohn's disease and ulcerative colitis, are diseases, which result in destruction of the mucosal surface of the small or large intestine, respectively. Thus, polynucleotides or polypeptides, as well as agonists or antagonists of the present invention, could be used to promote the resurfacing of the mucosal surface to aid more rapid healing and to prevent progression of inflammatory bowel disease. Treatment with polynucleotides or polypeptides, agonists or antagonists of the present invention, is expected to have a significant effect on the production of mucus throughout the gastrointestinal tract and could be used to protect the intestinal mucosa from injurious substances that are ingested or following surgery. Polynucleotides or polypeptides, as well as agonists or antagonists of the present invention, could be used to treat diseases associate with the under expression.

[0764] Moreover, polynucleotides or polypeptides, as well as agonists or antagonists of the present invention, could be used to prevent and heal damage to the lungs due to various pathological states. Polynucleotides or polypeptides, as well as agonists or antagonists of the present invention, could stimulate proliferation and differentiation and promote the repair of alveoli and brochiolar epithelium to prevent or treat acute or chronic lung damage. For example, emphysema, which results in the progressive loss of aveoli, and inhalation injuries, i.e., resulting from smoke inhalation and burns, that cause necrosis of the bronchiolar epithelium and alveoli could be effectively treated using polynucleotides or polypeptides, agonists or antagonists of the present invention. Also, polynucleotides or polypeptides, as well as agonists or antagonists of the present invention, could be used to stimulate the proliferation of and differentiation of type II pneumocytes, which may help treat or prevent disease such as hyaline membrane diseases, such as infant respiratory distress syndrome and bronchopulmonary displasia, in premature infants.

[0765] Polynucleotides or polypeptides, as well as agonists or antagonists of the present invention, could stimulate the proliferation and differentiation of hepatocytes and, thus, could be used to alleviate or treat liver diseases and pathologies such as fulminant liver failure caused by cirrhosis, liver damage caused by viral hepatitis and toxic substances (i.e., acetaminophen, carbon tetraholoride and other hepatotoxins known in the art).

[0766] In addition, polynucleotides or polypeptides, as well as agonists or antagonists of the present invention, could be used treat or prevent the onset of diabetes mellitus. In patients with newly diagnosed Types I and II diabetes, where some islet cell function remains, polynucleotides or polypeptides, as well as agonists or antagonists of the present invention, could be used to maintain the islet function so as to alleviate, delay or prevent permanent manifestation of the disease. Also, polynucleotides or polypeptides, as well as agonists or antagonists of the present invention, could be used as an auxiliary in islet cell transplantation to improve or promote islet cell function.

[0767] Infectious Disease

[0768] Polynucleotides or polypeptides, as well as agonists or antagonists of the present invention can be used to treat or detect infectious agents. For example, by increasing the immune response, particularly increasing the proliferation and differentiation of B and/or T cells, infectious diseases may be treated. The immune response may be increased by either enhancing an existing immune response, or by initiating a new immune response. Alternatively, polynucleotides or polypeptides, as well as agonists or antagonists of the present invention may also directly inhibit the infectious agent, without necessarily eliciting an immune response.

[0769] Viruses are one example of an infectious agent that can cause disease or symptoms that can be treated or detected by a polynucleotide or polypeptide and/or agonist or antagonist of the present invention. Examples of viruses, include, but are not limited to Examples of viruses, include, but are not limited to the following DNA and RNA viruses and viral families: Arbovirus, Adenoviridae, Arenaviridae, Arterivirus, Birnaviridae, Bunyaviridae, Caliciviridae, Circoviridae, Coronaviridae, Dengue, EBV, HIV, Flaviviridae, Hepadnaviridae (Hepatitis), Herpesviridae (such as, Cytomegalovirus, Herpes Simplex, Herpes Zoster), Mononegavirus (e.g., Paramyxoviridae, Morbillivirus, Rhabdoviridae), Orthomyxoviridae (e.g., Influenza A, Influenza B, and parainfluenza), Papiloma virus, Papovaviridae, Parvoviridae, Picornaviridae, Poxviridae (such as Smallpox or Vaccinia), Reoviridae (e.g., Rotavirus), Retroviridae (HTLV-I, HTLV-II, Lentivirus), and Togaviridae (e.g., Rubivirus). Viruses falling within these families can cause a variety of diseases or symptoms, including, but not limited to: arthritis, bronchiollitis, respiratory syncytial virus, encephalitis, eye infections (e.g., conjunctivitis, keratitis), chronic fatigue syndrome, hepatitis (A, B, C, E, Chronic Active, Delta), Japanese B encephalitis, Junin, Chikungunya, Rift Valley fever, yellow fever, meningitis, opportunistic infections (e.g., AIDS), pneumonia, Burkitt's Lymphoma, chickenpox, hemorrhagic fever, Measles, Mumps, Parainfluenza, Rabies, the common cold, Polio, leukemia, Rubella, sexually transmitted diseases, skin diseases (e.g., Kaposi's, warts), and viremia. polynucleotides or polypeptides, or agonists or antagonists of the invention, can be used to treat or detect any of these symptoms or diseases. In specific embodiments, polynucleotides, polypeptides, or agonists or antagonists of the invention are used to treat: meningitis, Dengue, EBV, and/or hepatitis (e.g., hepatitis B). In an additional specific embodiment polynucleotides, polypeptides, or agonists or antagonists of the invention are used to treat patients nonresponsive to one or more other commercially available hepatitis vaccines. In a further specific embodiment polynucleotides, polypeptides, or agonists or antagonists of the invention are used to treat AIDS.

[0770] Similarly, bacterial and fungal agents that can cause disease or symptoms and that can be treated or detected by a polynucleotide or polypeptide and/or agonist or antagonist of the present invention include, but not limited to, the following Gram-Negative and Gram-positive bacteria, bacterial families, and fungi: Actinomyces (e.g., Norcardia), Acinetobacter, Cryptococcus neoformans, Aspergillus, Bacillaceae (e.g., Bacillus anthrasis), Bacteroides (e.g., Bacteroides fragilis), Blastomycosis, Bordetella, Borrelia (e.g., Borrelia burgdorferi), Brucella, Candidia, Campylobacter, Chlamydia, Clostridium (e.g., Clostridium botulinum, Clostridium dificile, Clostridium perfringens, Clostridium tetani), Coccidioides, Corynebacterium (e.g., Corynebacterium diptheriae), Cryptococcus, Dermatocycoses, E. coli (e.g., Enterotoxigenic E. coli and Enterohemorrhagic E. coli), Enterobacter (e.g. Enterobacter aerogenes), Enterobacteriaceae (Klebsiella, Salmonella (e.g., Salmonella typhi, Salmonella enteritidis, Salmonella typhi), Serratia, Yersinia, Shigella), Erysipelothrix, Haemophilus (e.g., Haemophilus influenza type B), Helicobacter, Legionella (e.g., Legionella pneumophila), Leptospira, Listeria (e.g., Listeria monocytogenes), Mycoplasma, Mycobacterium (e.g., Mycobacterium leprae and Mycobacterium tuberculosis), Vibrio (e.g., Vibrio cholerae), Neisseriaceae (e.g., Neisseria gonorrhea, Neisseria meningitidis), Pasteurellacea, Proteus, Pseudomonas (e.g., Pseudomonas aeruginosa), Rickettsiaceae, Spirochetes (e.g., Treponema spp., Leptospira spp., Borrelia spp.), Shigella spp., Staphylococcus (e.g., Staphylococcus aureus), Meningiococcus, Pneumococcus and Streptococcus (e.g., Streptococcus pneumoniae and Groups A, B, and C Streptococci), and Ureaplasmas. These bacterial, parasitic, and fungal families can cause diseases or symptoms, including, but not limited to: antibiotic-resistant infections, bacteremia, endocarditis, septicemia, eye infections (e.g., conjunctivitis), uveitis, tuberculosis, gingivitis, bacterial diarrhea, opportunistic infections (e.g., AIDS related infections), paronychia, prosthesis-related infections, dental caries, Reiter's Disease, respiratory tract infections, such as Whooping Cough or Empyema, sepsis, Lyme Disease, Cat-Scratch Disease, dysentery, paratyphoid fever, food poisoning, Legionella disease, chronic and acute inflammation, erythema, yeast infections, typhoid, pneumonia, gonorrhea, meningitis (e.g., mengitis types A and B), chlamydia, syphillis, diphtheria, leprosy, brucellosis, peptic ulcers, anthrax, spontaneous abortions, birth defects, pneumonia, lung infections, ear infections, deafness, blindness, lethargy, malaise, vomiting, chronic diarrhea, Crohn's disease, colitis, vaginosis, sterility, pelvic inflammatory diseases, candidiasis, paratuberculosis, tuberculosis, lupus, botulism, gangrene, tetanus, impetigo, Rheumatic Fever, Scarlet Fever, sexually transmitted diseases, skin diseases (e.g., cellulitis, dermatocycoses), toxemia, urinary tract infections, wound infections, noscomial infections. Polynucleotides or polypeptides, agonists or antagonists of the invention, can be used to treat or detect any of these symptoms or diseases. In specific embodiments, polynucleotides, polypeptides, agonists or antagonists of the invention are used to treat: tetanus, diptheria, botulism, and/or meningitis type B.

[0771] Moreover, parasitic agents causing disease or symptoms that can be treated, prevented, and/or diagnosed by a polynucleotide or polypeptide and/or agonist or antagonist of the present invention include, but not limited to, the following families or class: Amebiasis, Babesiosis, Coccidiosis, Cryptosporidiosis, Dientamoebiasis, Dourine, Ectoparasitic, Giardias, Helminthiasis, Leishmaniasis, Schistisoma, Theileriasis, Toxoplasmosis, Trypanosomiasis, and Trichomonas and Sporozoans (e.g., Plasmodium virax, Plasmodium falciparium, Plasmodium malariae and Plasmodium ovale). These parasites can cause a variety of diseases or symptoms, including, but not limited to: Scabies, Trombiculiasis, eye infections, intestinal disease (e.g., dysentery, giardiasis), liver disease, lung disease, opportunistic infections (e.g., AIDS related), malaria, pregnancy complications, and toxoplasmosis. polynucleotides or polypeptides, or agonists or antagonists of the invention, can be used to treat, prevent, and/or diagnose any of these symptoms or diseases. In specific embodiments, polynucleotides, polypeptides, or agonists or antagonists of the invention are used to treat, prevent, and/or diagnose malaria.

[0772] Polynucleotides or polypeptides, as well as agonists or antagonists of the present invention of the present invention could either be by administering an effective amount of a polypeptide to the patient, or by removing cells from the patient, supplying the cells with a polynucleotide of the present invention, and returning the engineered cells to the patient (ex vivo therapy). Moreover, the polypeptide or polynucleotide of the present invention can be used as an antigen in a vaccine to raise an immune response against infectious disease.

[0773] Regeneration

[0774] Polynucleotides or polypeptides, as well as agonists or antagonists of the present invention can be used to differentiate, proliferate, and attract cells, leading to the regeneration of tissues. (See, Science 276:59-87 (1997).) The regeneration of tissues could be used to repair, replace, or protect tissue damaged by congenital defects, trauma (wounds, burns, incisions, or ulcers), age, disease (e.g. osteoporosis, osteocarthritis, periodontal disease, liver failure), surgery, including cosmetic plastic surgery, fibrosis, reperfusion injury, or systemic cytokine damage.

[0775] Tissues that could be regenerated using the present invention include organs (e.g., pancreas, liver, intestine, kidney, skin, endothelium), muscle (smooth, skeletal or cardiac), vasculature (including vascular and lymphatics), nervous, hematopoietic, and skeletal (bone, cartilage, tendon, and ligament) tissue. Preferably, regeneration occurs without. or decreased scarring. Regeneration also may include angiogenesis.

[0776] Moreover, polynucleotides or polypeptides, as well as agonists or antagonists of the present invention, may increase regeneration of tissues difficult to heal. For example, increased tendon/ligament regeneration would quicken recovery time after damage. Polynucleotides or polypeptides, as well as agonists or antagonists of the present invention could also be used prophylactically in an effort to avoid damage. Specific diseases that could be treated include of tendinitis, carpal tunnel syndrome, and other tendon or ligament defects. A further example of tissue regeneration of non-healing wounds includes pressure ulcers, ulcers associated with vascular insufficiency, surgical, and traumatic wounds.

[0777] Similarly, nerve and brain tissue could also be regenerated by using polynucleotides or polypeptides, as well as agonists or antagonists of the present invention, to proliferate and differentiate nerve cells. Diseases that could be treated using this method include central and peripheral nervous system diseases, neuropathies, or mechanical and traumatic disorders (e.g., spinal cord disorders, head trauma, cerebrovascular disease, and stoke). Specifically, diseases associated with peripheral nerve injuries, peripheral neuropathy (e.g., resulting from chemotherapy or other medical therapies), localized neuropathies, and central nervous system diseases (e.g., Alzheimer's disease, Parkinson's disease, Huntington's disease, amyotrophic lateral sclerosis, and Shy-Drager syndrome), could all be treated using the polynucleotides or polypeptides, as well as agonists or antagonists of the present invention.

[0778] Chemotaxis

[0779] Polynucleotides or polypeptides, as well as agonists or antagonists of the present invention may have chemotaxis activity. A chemotaxic molecule attracts or mobilizes cells (e.g., monocytes, fibroblasts, neutrophils, T-cells, mast cells, eosinophils, epithelial and/or endothelial cells) to, a particular site in the body, such as inflammation, infection, or site of hyperproliferation. The mobilized cells can then fight off and/or heal the particular trauma or abnormality.

[0780] Polynucleotides or polypeptides, as well as agonists or antagonists of the present invention may increase chemotaxic activity of particular cells. These chemotactic molecules can then be used to treat inflammation, infection, hyperproliferative disorders, or any immune system disorder by increasing the number of cells targeted to a particular location in the body. For example, chemotaxic molecules can be used to treat wounds and other trauma to tissues by attracting immune cells to the injured location. Chemotactic molecules of the present invention can also attract fibroblasts, which can be used to treat wounds.

[0781] It is also contemplated that polynucleotides or polypeptides, as well as agonists or antagonists of the present invention may inhibit chemotactic activity. These molecules could also be used to treat disorders. Thus, polynucleotides or polypeptides, as well as agonists or antagonists of the present invention could be used as an inhibitor of chemotaxis.

[0782] Binding Activity

[0783] A polypeptide of the present invention may be used to screen for molecules that bind to the polypeptide or for molecules to which the polypeptide binds. The binding of the polypeptide and the molecule may activate (agonist), increase, inhibit (antagonist), or decrease activity of the polypeptide or the molecule bound. Examples of such molecules include antibodies, oligonucleotides, proteins (e.g., receptors), or small molecules.

[0784] Preferably, the molecule is closely related to the natural ligand of the polypeptide, e.g., a fragment of the ligand, or a natural substrate, a ligand, a structural or functional mimetic. (See, Coligan et at., Current Protocols in Immunology 1(2):Chapter 5 (1991).) Similarly, the molecule can be closely related to the natural receptor to which the polypeptide binds, or at least, a fragment of the receptor capable of being bound by the polypeptide (e.g., active site). In either case, the molecule can be rationally designed using known techniques.

[0785] Preferably, the screening for these molecules involves producing appropriate cells which express the polypeptide. Preferred cells include cells from mammals, yeast, Drosophila, or E. coli. Cells expressing the polypeptide (or cell membrane containing the expressed polypeptide) are then preferably contacted with a test compound potentially containing the molecule to observe binding, stimulation, or inhibition of activity of either the polypeptide or the molecule.

[0786] The assay may simply test binding of a candidate compound to the polypeptide, wherein binding is detected by a label, or in an assay involving competition with a labeled competitor. Further, the assay may test whether the candidate compound results in a signal generated by binding to the polypeptide.

[0787] Alternatively, the assay can be carried out using cell-free preparations, polypeptide/molecule affixed to a solid support, chemical libraries, or natural product mixtures. The assay may also simply comprise the steps of mixing a candidate compound with a solution containing a polypeptide, measuring polypeptide/molecule activity or binding, and comparing the polypeptide/molecule activity or binding to a standard.

[0788] Preferably, an ELISA assay can measure polypeptide level or activity in a sample (e.g., biological sample) using a monoclonal or polyclonal antibody. The antibody can measure polypeptide level or activity by either binding, directly or indirectly, to the polypeptide or by competing with the polypeptide for a substrate.

[0789] Additionally, the receptor to which the polypeptide of the present invention binds can be identified by numerous methods known to those of skill in the art, for example, ligand panning and FACS sorting (Coligan, et al., Current Protocols in Immun., 1(2), Chapter 5, (1991)). For example, expression cloning is employed wherein polyadenylated RNA is prepared from a cell responsive to the polypeptides, for example, NIH3T3 cells which are known to contain multiple receptors for the FGF family proteins, and SC-3 cells, and a cDNA library created from this RNA is divided into pools and used to transfect COS cells or other cells that are not responsive to the polypeptides. Transfected cells which are grown on glass slides are exposed to the polypeptide of the present invention, after they have been labeled. The polypeptides can be labeled by a variety of means including iodination or inclusion of a recognition site for a site-specific protein kinase.

[0790] Following fixation and incubation, the slides are subjected to auto-radiographic analysis. Positive pools are identified and sub-pools are prepared and re-transfected using an iterative sub-pooling and re-screening process, eventually yielding a single clones that encodes the putative receptor.

[0791] As an alternative approach for receptor identification, the labeled polypeptides can be photoaffinity linked with cell membrane or extract preparations that express the receptor molecule. Cross-linked material is resolved by PAGE analysis and exposed to X-ray film. The labeled complex containing the receptors of the polypeptides can be excised, resolved into peptide fragments, and subjected to protein microsequencing. The amino acid sequence obtained from microsequencing would be used to design a set of degenerate oligonucleotide probes to screen a CDNA library to identify the genes encoding the putative receptors.

[0792] Moreover, the techniques of gene-shuffling, motif-shuffling, exon-shuffling, and/or codon-shuffling (collectively referred to as “DNA shuffling”) may be employed to modulate the activities of the polypeptide of the present invention thereby effectively generating agonists and antagonists of the polypeptide of the present invention. See generally, U.S. Pat. Nos. 5,605,793, 5,811,238, 5,830,721, 5,834,252, and 5,837,458, and Patten, P. A., et al., Curr. Opinion Biotechnol. 8:724-33 (1997); Harayama, S. Trends Biotechnol. 16(2):76-82 (1998); Hansson L. O., et al., J. Mol. Biol. 287:265-76 (1999); and Lorenzo, M. M. and Blasco, R. Biotechniques 24(2):308-13 (1998); each of these patents and publications are hereby incorporated by reference). In one embodiment, alteration of polynucleotides and corresponding polypeptides may be achieved by DNA shuffling. DNA shuffling involves the assembly of two or more DNA segments into a desired molecule by homologous, or site-specific, recombination. In another embodiment, polynucleotides and corresponding polypeptides may be altered by being subjected to random mutagenesis by error-prone PCR, random nucleotide insertion or other methods prior to recombination. In another embodiment, one or more components, motifs, sections, parts, domains, fragments, etc., of the polypeptide of the present invention may be recombined with one or more components, motifs, sections, parts, domains, fragments, etc. of one or more heterologous molecules. In preferred embodiments, the heterologous molecules are family members. In further preferred embodiments, the heterologous molecule is a growth factor such as, for example, platelet-derived growth factor (PDGF), insulin-like growth factor (IGF-I), transforming growth factor (TGF)-alpha, epidermal growth factor (EGF), fibroblast growth factor (FGF), TGF-beta, bone morphogenetic protein (BMP)-2, BMP-4, BMP-5, BMP-6, BMP-7, activins A and B, decapentaplegic(dpp), 60A, OP-2, dorsalin, growth differentiation factors (GDFs), nodal, MIS, inhibin-alpha, TGF-betal, TGF-beta2, TGF-beta3, TGF-beta5, and glial-derived neurotrophic factor (GDNF).

[0793] Other preferred fragments are biologically active fragments of the polypeptide of the present invention. Biologically active fragments are those exhibiting activity similar, but not necessarily identical, to an activity of the polypeptide of the present invention. The biological activity of the fragments may include an improved desired activity, or a decreased undesirable activity.

[0794] Additionally, this invention provides a method of screening compounds to identify those which modulate the action of the polypeptide of the present invention. An example of such an assay comprises combining a mammalian fibroblast cell, the polypeptide of the present invention, the compound to be screened and ³[H] thymidine under cell culture conditions where the fibroblast cell would normally proliferate. A control assay may be performed in the absence of the compound to be screened and compared to the amount of fibroblast proliferation in the presence of the compound to determine if the compound stimulates proliferation by determining the uptake of ³[H] thymidine in each case. The amount of fibroblast cell proliferation is measured by liquid scintillation chromatography, which measures the incorporation of ³[H] thymidine. Both agonist and antagonist compounds may be identified by this procedure.

[0795] In another method, a mammalian cell or membrane preparation expressing a receptor for a polypeptide of the present invention is incubated with a labeled polypeptide of the present invention in the presence of the compound. The ability of the compound to enhance or block this interaction could then be measured. Alternatively, the response of a known second messenger system following interaction of a compound to be screened and the receptor is measured and the ability of the compound to bind to the receptor and elicit a second messenger response is measured to determine if the compound is a potential agonist or antagonist. Such second messenger systems include but are not limited to, cAMP guanylate cyclase, ion channels or phosphoinositide hydrolysis.

[0796] All of these above assays can be used as diagnostic or prognostic markers. The molecules discovered using these assays can be used to treat disease or to bring about a particular result in a patient (e.g., blood vessel growth) by activating or inhibiting the polypeptide/molecule. Moreover, the assays can discover agents which may inhibit or enhance the production of the polypeptides of the invention from suitably manipulated cells or tissues.

[0797] Therefore, the invention includes a method of identifying compounds which bind to a polypeptide of the invention comprising the steps of: (a) incubating a candidate binding compound with a polypeptide of the present invention; and (b) determining if binding has occurred. Moreover, the invention includes a method of identifying agonists/antagonists comprising the steps of: (a) incubating a candidate compound with a polypeptide of the present invention, (b) assaying a biological activity, and (b) determining if a biological activity of the polypeptide has been altered.

[0798] Targeted Delivery

[0799] In another embodiment, the invention provides a method of delivering compositions to targeted cells expressing a receptor for a polypeptide of the invention, or cells expressing a cell bound form of a polypeptide of the invention.

[0800] As discussed herein, polypeptides or antibodies of the invention may be associated with heterologous polypeptides, heterologous nucleic acids, toxins, or prodrugs via hydrophobic, hydrophilic, ionic and/or covalent interactions. In one embodiment, the invention provides a method for the specific delivery of compositions of the invention to cells by administering polypeptides of the invention (including antibodies) that are associated with heterologous polypeptides or nucleic acids. In one example, the invention provides a method for delivering a therapeutic protein into the targeted cell. In another example, the invention provides a method for delivering a single stranded nucleic acid (e.g., antisense or ribozymes) or double stranded nucleic acid (e.g., DNA that can integrate into the cell's genome or replicate episomally and that can be transcribed) into the targeted cell.

[0801] In another embodiment, the invention provides a method for the specific destruction of cells (e.g., the destruction of tumor cells) by administering polypeptides of the invention (e.g., polypeptides of the invention or antibodies of the invention) in association with toxins or cytotoxic prodrugs.

[0802] By “toxin” is meant compounds that bind and activate endogenous cytotoxic effector systems, radioisotopes, holotoxins, modified toxins, catalytic subunits of toxins, or any molecules or enzymes not normally present in or on the surface of a cell that under defined conditions cause the cell's death. Toxins that may be used according to the methods of the invention include, but are not limited to, radioisotopes known in the art, compounds such as, for example, antibodies (or complement fixing containing portions thereof) that bind an inherent or induced endogenous cytotoxic effector system, thymidine kinase, endonuclease, RNAse, alpha-toxin, ricin, abrin, Pseudomonas exotoxin A, diphtheria toxin, saporin, momordin, gelonin, pokeweed antiviral protein, alpha-sarcin and cholera toxin. By “cytotoxic prodrug” is meant a non-toxic compound that is converted by an enzyme, normally present in the cell, into a cytotoxic compound. Cytotoxic prodrugs that may be used according to the methods of the invention include, but are not limited to, glutamyl derivatives of benzoic acid mustard alkylating agent, phosphate derivatives of etoposide or mitomycin C, cytosine arabinoside, daunorubisin, and phenoxyacetamide derivatives of doxorubicin.

[0803] Drug Screening

[0804] Further contemplated is the use of the polypeptides of the present invention, or the polynucleotides encoding these polypeptides, to screen for molecules which modify the activities of the polypeptides of the present invention. Such a method would include contacting the polypeptide of the present invention with a selected compound(s) suspected of having antagonist or agonist activity, and assaying the activity of these polypeptides following binding.

[0805] This invention is particularly useful for screening therapeutic compounds by using the polypeptides of the present invention, or binding fragments thereof, in any of a variety of drug screening techniques. The polypeptide or fragment employed in such a test may be affixed to a solid support, expressed on a cell surface, free in solution, or located intracellularly. One method of drug screening utilizes eukaryotic or prokaryotic host cells which are stably transformed with recombinant nucleic acids expressing the polypeptide or fragment. Drugs are screened against such transformed cells in competitive binding assays. One may measure, for example, the formulation of complexes between the agent being tested and a polypeptide of the present invention.

[0806] Thus, the present invention provides methods of screening for drugs or any other agents which affect activities mediated by the polypeptides of the present invention. These methods comprise contacting such an agent with a polypeptide of the present invention or a fragment thereof and assaying for the presence of a complex between the agent and the polypeptide or a fragment thereof, by methods well known in the art. In such a competitive binding assay, the agents to screen are typically labeled. Following incubation, free agent is separated from that present in bound form, and the amount of free or uncomplexed label is a measure of the ability of a particular agent to bind to the polypeptides of the present invention.

[0807] Another technique for drug screening provides high throughput screening for compounds having suitable binding affinity to the polypeptides of the present invention, and is described in great detail in European Patent Application 84/03564, published on Sep. 13, 1984, which is incorporated herein by reference herein. Briefly stated, large numbers of different small peptide test compounds are synthesized on a solid substrate, such as plastic pins or some other surface. The peptide test compounds are reacted with polypeptides of the present invention and washed. Bound polypeptides are then detected by methods well known in the art. Purified polypeptides are coated directly onto plates for use in the aforementioned drug screening techniques. In addition, non-neutralizing antibodies may be used to capture the peptide and immobilize it on the solid support.

[0808] This invention also contemplates the use of competitive drug screening assays in which neutralizing antibodies capable of binding polypeptides of the present invention specifically compete with a test compound for binding to the polypeptides or fragments thereof. In this manner, the antibodies are used to detect the presence of any peptide which shares one or more antigenic epitopes with a polypeptide of the invention.

[0809] Antisense and Ribozyme (Antagonists)

[0810] In specific embodiments, antagonists according to the present invention are nucleic acids corresponding to the sequences contained in SEQ ID NO:X, or the complementary strand thereof, and/or to CDNA sequences contained in cDNA Clone ID NO:Z identified for example, in Table 1A. In one embodiment, antisense sequence is generated internally, by the organism, in another embodiment, the antisense sequence is separately administered (see, for example, O'Connor, J., Neurochem. 56:560 (1991). Oligodeoxynucleotides as Antisense Inhibitors of Gene Expression, CRC Press, Boca Raton, Fla. (1988). Antisense technology can be used to control gene expression through antisense DNA or RNA, or through triple-helix formation. Antisense techniques are discussed for example, in Okano, J., Neurochem. 56:560 (1991); Oligodeoxynucleotides as Antisense Inhibitors of Gene Expression, CRC Press, Boca Raton, Fla. (1988). Triple helix formation is discussed in, for instance, Lee et al., Nucleic Acids Research 6:3073 (1979); Cooney et al., Science 241:456 (1988); and Dervan et al., Science 251:1300 (1991). The methods are based on binding of a polynucleotide to a complementary DNA or RNA.

[0811] For example, the use of c-myc and c-myb antisense RNA constructs to inhibit the growth of the non-lymphocytic leukemia cell line HL-60 and other cell lines was previously described. (Wickstrom et al. (1988); Anfossi et al. (1989)). These experiments were performed in vitro by incubating cells with the oligoribonucleotide. A similar procedure for in vivo use is described in WO 91/15580. Briefly, a pair of oligonucleotides for a given antisense RNA is produced as follows: A sequence complimentary to the first 15 bases of the open reading frame is flanked by an EcoR1 site on the 5′ end and a HindIII site on the 3′ end. Next, the pair of oligonucleotides is heated at 90° C. for one minute and then annealed in 2X ligation buffer (20 mM TRIS HCI pH 7.5, 10 mM MgCl2, 10MM dithiothreitol (DTT) and 0.2 mM ATP) and then ligated to the EcoR1/Hind III site of the retroviral vector PMV7 (WO 91/15580).

[0812] For example, the 5′ coding portion of a polynucleotide that encodes the polypeptide of the present invention may be used to design an antisense RNA oligonucleotide of from about 10 to 40 base pairs in length. A DNA oligonucleotide is designed to be complementary to a region of the gene involved in transcription thereby preventing transcription and the production of the receptor. The antisense RNA oligonucleotide hybridizes to the mRNA in vivo and blocks translation of the mRNA molecule into receptor polypeptide.

[0813] In one embodiment, the antisense nucleic acid of the invention is produced intracellularly by transcription from an exogenous sequence. For example, a vector or a portion thereof, is transcribed, producing an antisense nucleic acid (RNA) of the invention. Such a vector would contain a sequence encoding the antisense nucleic acid. Such a vector can remain episomal or become chromosomally integrated, as long as it can be transcribed to produce the desired antisense RNA. Such vectors can be constructed by recombinant DNA technology methods standard in the art. Vectors can be plasmid, viral, or others known in the art, used for replication and expression in vertebrate cells. Expression of the sequence encoding the polypeptide of the present invention or fragments thereof, can be by any promoter known in the art to act in vertebrate, preferably human cells. Such promoters can be inducible or constitutive. Such promoters include, but are not limited to, the SV40 early promoter region (Bemoist and Chambon, Nature 29:304-310 (1981), the promoter contained in the 3′ long terminal repeat of Rous sarcoma virus (Yamamoto et al., Cell 22:787-797 (1980), the herpes thymidine promoter (Wagner et al., Proc. Natl. Acad. Sci. U.S.A. 78:1441-1445 (1981), the regulatory sequences of the metallothionein gene (Brinster, et al., Nature 296:39-42 (1982)), etc.

[0814] The antisense nucleic acids of the invention comprise a sequence complementary to at least a portion of an RNA transcript of a gene of the present invention. However, absolute complementarity, although preferred, is not required. A sequence “complementary to at least a portion of an RNA,” referred to herein, means a sequence having sufficient complementarity to be able to hybridize with the RNA, forming a stable duplex; in the case of double stranded antisense nucleic acids, a single strand of the duplex DNA may thus be tested, or triplex formation may be assayed. The ability to hybridize will depend on both the degree of complementarity and the length of the antisense nucleic acid. Generally, the larger the hybridizing nucleic acid, the more base mismatches with a RNA it may contain and still form a stable duplex (or triplex as the case may be). One skilled in the art can ascertain a tolerable degree of mismatch by use of standard procedures to determine the melting point of the hybridized complex.

[0815] Oligonucleotides that are complementary to the 5′ end of the message, e.g., the 5′ untranslated sequence up to and including the AUG initiation codon, should work most efficiently at inhibiting translation. However, sequences complementary to the 3′ untranslated sequences of mRNAs have been shown to be effective at inhibiting translation of mRNAs as well. See generally, Wagner, R., 1994, Nature 372:333-335. Thus, oligonucleotides complementary to either the 5′- or 3′-non-translated, non-coding regions of polynucleotide sequences described herein could be used in an antisense approach to inhibit translation of endogenous mRNA. Oligonucleotides complementary to the 5′ untranslated region of the mRNA should include the complement of the AUG start codon. Antisense oligonucleotides complementary to mRNA coding regions are less efficient inhibitors of translation but could be used in accordance with the invention. Whether designed to hybridize to the 5′-, 3′- or coding region of mRNA of the present invention, antisense nucleic acids should be at least six nucleotides in length, and are preferably oligonucleotides ranging from 6 to about 50 nucleotides in length. In specific aspects the oligonucleotide is at least 10 nucleotides, at least 17 nucleotides, at least 25 nucleotides or at least 50 nucleotides.

[0816] The polynucleotides of the invention can be DNA or RNA or chimeric mixtures or derivatives or modified versions thereof, single-stranded or double-stranded. The oligonucleotide can be modified at the base moiety, sugar moiety, or phosphate backbone, for example, to improve stability of the molecule, hybridization, etc. The oligonucleotide may include other appended groups such as peptides (e.g., for targeting host cell receptors in vivo), or agents facilitating transport across the cell membrane (see, e.g., Letsinger et al., 1989, Proc. Natl. Acad. Sci. U.S.A. 86:6553-6556; Lemaitre et al., 1987, Proc. Natl. Acad. Sci. 84:648-652; PCT Publication No. WO88/09810, published Dec. 15, 1988) or the blood-brain barrier (see, e.g., PCT Publication No. WO89/10134, published Apr. 25, 1988), hybridization-triggered cleavage agents. (See, e.g., Krol et al., 1988, BioTechniques 6:958-976) or intercalating agents. (See, e.g., Zon, 1988, Pharm. Res. 5:539-549). To this end, the oligonucleotide may be conjugated to another molecule, e.g., a peptide, hybridization triggered cross-linking agent, transport agent, hybridization-triggered cleavage agent, etc.

[0817] The antisense oligonucleotide may comprise at least one modified base moiety which is selected from the group including, but not limited to, 5-fluorouracil, 5-bromouracil, 5-chlorouracil, 5-iodouracil, hypoxanthine, xantine, 4-acetylcytosine, 5-(carboxyhydroxylmethyl) uracil, 5-carboxymethylaminomethyl-2-thiouridine, 5-carboxymethylaminomethyluracil, dihydrouracil, beta-D-galactosylqueosine, inosine, N6-isopentenyladenine, 1-methylguanine, 1-methylinosine, 2,2-dimethylguanine, 2-methyladenine, 2-methylguanine, 3-methylcytosine, 5-methylcytosine, N6-adenine, 7-methylguanine, 5-methylaminomethyluracil, 5-methoxyaminomethyl-2-thiouracil, beta-D-mannosylqueosine, 5′-methoxycarboxymethyluracil, 5-methoxyuracil, 2-methylthio-N6-isopentenyladenine, uracil-5-oxyacetic acid (v), wybutoxosine, pseudouracil, queosine, 2-thiocytosine, 5-methyl-2-thiouracil, 2-thiouracil, 4-thiouracil, 5-methyluracil, uracil-5-oxyacetic acid methylester, uracil-5-oxyacetic acid (v), 5-methyl-2-thiouracil, 3-(3-amino-3-N-2-carboxypropyl) uracil, (acp3)w, and 2,6-diaminopurine.

[0818] The antisense oligonucleotide may also comprise at least one modified sugar moiety selected from the group including, but not limited to, arabinose, 2-fluoroarabinose, xylulose, and hexose.

[0819] In yet another embodiment, the antisense oligonucleotide comprises at least one modified phosphate backbone selected from the group including, but not limited to, a phosphorothioate, a phosphorodithioate, a phosphoramidothioate, a phosphoramidate, a phosphordiamidate, a methylphosphonate, an alkyl phosphotriester, and a formacetal or analog thereof.

[0820] In yet another embodiment, the antisense oligonucleotide is an a-anomeric oligonucleotide. An a-anomeric oligonucleotide forms specific double-stranded hybrids with complementary RNA in which, contrary to the usual b-units, the strands run parallel to each other (Gautier et al., 1987, Nucl. Acids Res. 15:6625-6641). The oligonucleotide is a 2′-0-methylribonucleotide (Inoue et al., 1987, Nucl. Acids Res. 15:6131-6148), or a chimeric RNA-DNA analogue (Inoue et al., 1987, FEBS Lett. 215:327-330).

[0821] Polynucleotides of the invention may be synthesized by standard methods known in the art, e.g. by use of an automated DNA synthesizer (such as are commercially available from Biosearch, Applied Biosystems, etc.). As examples, phosphorothioate oligonucleotides may be synthesized by the method of Stein et al. (1988, Nucl. Acids Res. 16:3209), methylphosphonate oligonucleotides can be prepared by use of controlled pore glass polymer supports (Sarin et al., 1988, Proc. Natl. Acad. Sci. U.S.A. 85:7448-7451), etc.

[0822] While antisense nucleotides complementary to the coding region sequence could be used, those complementary to the transcribed untranslated region are most preferred.

[0823] Potential antagonists according to the invention also include catalytic RNA, or a ribozyme (See, e.g., PCT International Publication WO 90/11364, published Oct. 4, 1990; Sarver et al, Science 247:1222-1225 (1990). While ribozymes that cleave mRNA at site specific recognition sequences can be used to destroy mRNAs, the use of hammerhead ribozymes is preferred. Hammerhead ribozymes cleave mRNAs at locations dictated by flanking regions that form complementary base pairs with the target mRNA. The sole requirement is that the target mRNA have the following sequence of two bases: 5′-UG-3′. The construction and production of hammerhead ribozymes is well known in the art and is described more fully in Haseloff and Gerlach, Nature 334:585-591 (1988). There are numerous potential hammerhead ribozyme cleavage sites within the nucleotide sequence of SEQ ID NO:X. Preferably, the ribozyme is engineered so that the cleavage recognition site is located near the 5′ end of the mRNA; i.e., to increase efficiency and minimize the intracellular accumulation of non-functional mRNA transcripts.

[0824] As in the antisense approach, the ribozymes of the invention can be composed of modified oligonucleotides (e.g. for improved stability, targeting, etc.) and should be delivered to cells which express in vivo. DNA constructs encoding the ribozyme may be introduced into the cell in the same manner as described above for the introduction of antisense encoding DNA. A preferred method of delivery involves using a DNA construct “encoding” the ribozyme under the control of a strong constitutive promoter, such as, for example, pol III or pol II promoter, so that transfected cells will produce sufficient quantities of the ribozyme to destroy endogenous messages and inhibit translation. Since ribozymes unlike antisense molecules, are catalytic, a lower intracellular concentration is required for efficiency.

[0825] Antagonist/agonist compounds may be employed to inhibit the cell growth and proliferation effects of the polypeptides of the present invention on neoplastic cells and tissues, i.e. stimulation of angiogenesis of tumors, and, therefore, retard or prevent abnormal cellular growth and proliferation, for example, in tumor formation or growth.

[0826] The antagonist/agonist may also be employed to prevent hyper-vascular diseases, and prevent the proliferation of epithelial lens cells after extracapsular cataract surgery. Prevention of the mitogenic activity of the polypeptides of the present invention may also be desirous in cases such as restenosis after balloon angioplasty.

[0827] The antagonist/agonist may also be employed to prevent the growth of scar tissue during wound healing.

[0828] The antagonist/agonist may also be employed to treat the diseases described herein.

[0829] Thus, the invention provides a method of treating disorders or diseases, including but not limited to the disorders or diseases listed throughout this application, associated with overexpression of a polynucleotide of the present invention by administering to a patient (a) an antisense molecule directed to the polynucleotide of the present invention, and/or (b) a ribozyme directed to the polynucleotide of the present invention.

[0830] Binding Peptides and Other Molecules

[0831] The invention also encompasses screening methods for identifying polypeptides and nonpolypeptides that bind ovarian and/or breast cancer antigen polypeptides, and the ovarian and/or breast cancer antigen binding molecules identified thereby. These binding molecules are useful, for example, as agonists and antagonists of the ovarian and/or breast cancer antigen polypeptides. Such agonists and antagonists can be used, in accordance with the invention, in the therapeutic embodiments described in detail, below.

[0832] This method comprises the steps of:

[0833] contacting ovarian and/or breast cancer antigen polypeptides or ovarian and/or breast cancer antigen-like polypeptides with a plurality of molecules; and

[0834] identifying a molecule that binds the ovarian and/or breast cancer antigen polypeptides or ovarian and/or breast cancer antigen-like polypeptides.

[0835] The step of contacting the ovarian and/or breast cancer antigen polypeptides or ovarian and/or breast cancer antigen-like polypeptides with the plurality of molecules may be effected in a number of ways. For example, one may contemplate immobilizing the ovarian and/or breast cancer antigen polypeptides or ovarian and/or breast cancer antigen-like polypeptides on a solid support and bringing a solution of the plurality of molecules in contact with the immobilized ovarian and/or breast cancer antigen polypeptides or ovarian and/or breast cancer antigen-like polypeptides. Such a procedure would be akin to an affinity chromatographic process, with the affinity matrix being comprised of the immobilized ovarian and/or breast cancer antigen polypeptides or ovarian and/or breast cancer antigen-like polypeptides. The molecules having a selective affinity for the ovarian and/or breast cancer antigen polypeptides or ovarian and/or breast cancer antigen-like polypeptides can then be purified by affinity selection. The nature of the solid support, process for attachment of the ovarian and/or breast cancer antigen polypeptides or ovarian and/or breast cancer antigen-like polypeptides to the solid support, solvent, and conditions of the affinity isolation or selection are largely conventional and well known to those of ordinary skill in the art.

[0836] Alternatively, one may also separate a plurality of polypeptides into substantially separate fractions comprising a subset of or individual polypeptides. For instance, one can separate the plurality of polypeptides by gel electrophoresis, column chromatography, or like method known to those of ordinary skill for the separation of polypeptides. The individual polypeptides can also be produced by a transformed host cell in such a way as to be expressed on or about its outer surface (e.g., a recombinant phage). Individual isolates can then be “probed” by the ovarian and/or breast cancer antigen polypeptides or ovarian and/or breast cancer antigen-like polypeptides, optionally in the presence of an inducer should one be required for expression, to determine if any selective affinity interaction takes place between the ovarian and/or breast cancer antigen polypeptides or ovarian and/or breast cancer antigen-like polypeptides and the individual clone. Prior to contacting the ovarian and/or breast cancer antigen polypeptides or ovarian and/or breast cancer antigen-like polypeptides with each fraction comprising individual polypeptides, the polypeptides could first be transferred to a solid support for additional convenience. Such a solid support may simply be a piece of filter membrane, such as one made of nitrocellulose or nylon. In this manner, positive clones could be identified from a collection of transformed host cells of an expression library, which harbor a DNA construct encoding a polypeptide having a selective affinity for ovarian and/or breast cancer antigen polypeptides or ovarian and/or breast cancer antigen-like polypeptides. Furthermore, the amino acid sequence of the polypeptide having a selective affinity for the ovarian and/or breast cancer antigen polypeptides or ovarian and/or breast cancer antigen-like polypeptides can be determined directly by conventional means or the coding sequence of the DNA encoding the polypeptide can frequently be determined more conveniently. The primary sequence can then be deduced from the corresponding DNA sequence. If the amino acid sequence is to be determined from the polypeptide itself, one may use microsequencing techniques. The sequencing technique may include mass spectroscopy.

[0837] In certain situations, it may be desirable to wash away any unbound ovarian and/or breast cancer antigen polypeptides or ovarian and/or breast cancer antigen-like polypeptides, or alternatively, unbound polypeptides, from a mixture of the ovarian and/or breast cancer antigen polypeptides or ovarian and/or breast cancer antigen-like polypeptides and the plurality of polypeptides prior to attempting to determine or to detect the presence of a selective affinity interaction. Such a wash step may be particularly desirable when the ovarian and/or breast cancer antigen polypeptides or ovarian and/or breast cancer antigen-like polypeptides or the plurality of polypeptides is bound to a solid support.

[0838] The plurality of molecules provided according to this method may be provided by way of diversity libraries, such as random or combinatorial peptide or nonpeptide libraries which can be screened for molecules that specifically bind ovarian and/or breast cancer antigen polypeptides. Many libraries are known in the art that can be used, e.g., chemically synthesized libraries, recombinant (e.g., phage display libraries), and in vitro translation-based libraries. Examples of chemically synthesized libraries are described in Fodor et al., 1991, Science 251:767-773; Houghten et al., 1991, Nature 354:84-86; Lam et al., 1991, Nature 354:82-84; Medynski, 1994, Bio/Technology 12:709-710;Gallop et al., 1994, J. Medicinal Chemistry 37(9):1233-1251; Ohlmeyer et al., 1993, Proc. Natl. Acad. Sci. USA 90:10922-10926; Erb et al., 1994, Proc. Natl. Acad. Sci. USA 91:11422-11426; Houghten et al., 1992, Biotechniques 13:412; Jayawickreme et al., 1994, Proc. Natl. Acad. Sci. USA 91:1614-1618; Salmon et al., 1993, Proc. Natl. Acad. Sci. USA 90:11708-11712; PCT Publication No. WO 93/20242; and Brenner and Lerner, 1992, Proc. Natl. Acad. Sci. USA 89:5381-5383.

[0839] Examples of phage display libraries are described in Scott and Smith, 1990, Science 249:386-390; Devlin et al., 1990, Science, 249:404-406; Christian, R. B., et al., 1992, J. Mol. Biol. 227:711-718); Lenstra, 1992, J. Immunol. Meth. 152:149-157; Kay et al., 1993, Gene 128:59-65; and PCT Publication No. WO 94/₁₈₃₁₈ dated Aug. 18, 1994.

[0840] In vitro translation-based libraries include but are not limited to those described in PCT Publication No. WO 91/05058 dated Apr. 18, 1991; and Mattheakis et al., 1994, Proc. Natl. Acad. Sci. USA 91:9022-9026.

[0841] By way of examples of nonpeptide libraries, a benzodiazepine library (see e.g., Bunin et al., 1994, Proc. Natl. Acad. Sci. USA 91:4708-4712) can be adapted for use. Peptoid libraries (Simon et al., 1992, Proc. Natl. Acad. Sci. USA 89:9367-9371) can also be used. Another example of a library that can be used, in which the amide functionalities in peptides have been permethylated to generate a chemically transformed combinatorial library, is described by Ostresh et al. (1994, Proc. Natl. Acad. Sci. USA 91:11138-11142).

[0842] The variety of non-peptide libraries that are useful in the present invention is great. For example, Ecker and Crooke, 1995, Bio/Technology 13:351-360 list benzodiazepines, hydantoins, piperazinediones, biphenyls, sugar analogs, beta-mercaptoketones, arylacetic acids, acylpiperidines, benzopyrans, cubanes, xanthines, aminimides, and oxazolones as among the chemical species that form the basis of various libraries.

[0843] Non-peptide libraries can be classified broadly into two types: decorated monomers and oligomers. Decorated monomer libraries employ a relatively simple scaffold structure upon which a variety functional groups is added. Often the scaffold will be a molecule with a known useful pharmacological activity. For example, the scaffold might be the benzodiazepine structure.

[0844] Non-peptide oligomer libraries utilize a large number of monomers that are assembled together in ways that create new shapes that depend on the order of the monomers. Among the monomer units that have been used are carbamates, pyrrolinones, and morpholinos. Peptoids, peptide-like oligomers in which the side chain is attached to the alpha amino group rather than the alpha carbon, form the basis of another version of non-peptide oligomer libraries. The first non-peptide oligomer libraries utilized a single type of monomer and thus contained a repeating backbone. Recent libraries have utilized more than one monomer, giving the libraries added flexibility.

[0845] Screening the libraries can be accomplished by any of a variety of commonly known methods. See, e.g., the following references, which disclose screening of peptide libraries: Parmley and Smith, 1989, Adv. Exp. Med. Biol. 251:215-218; Scott and Smith, 1990, Science 249:386-390; Fowlkes et al., 1992; BioTechniques 13:422-427; Oldenburg et al., 1992, Proc. Natl. Acad. Sci. USA 89:5393-5397; Yu et al., 1994, Cell 76:933-945; Staudt et al., 1988, Science 241:577-580; Bock et al., 1992, Nature 355:564-566; Tuerk et al., 1992, Proc. Natl. Acad. Sci. USA 89:6988-6992; Ellington et al., 1992, Nature 355:850-852; U.S. Pat. No. 5,096,815, U.S. Pat. No. 5,223,409, and U.S. Pat. No. 5,198,346, all to Ladner et al.; Rebar and Pabo, 1993, Science 263:671-673; and CT Publication No. WO 94/18318.

[0846] In a specific embodiment, screening to identify a molecule that binds ovarian and/or breast cancer antigen polypeptides can be carried out by contacting the library members with an ovarian and/or breast cancer antigen polypeptides or ovarian and/or breast cancer antigen-like polypeptides immobilized on a solid phase and harvesting those library members that bind to the ovarian and/or breast cancer antigen polypeptides or ovarian and/or breast cancer antigen-like polypeptides. Examples of such screening methods, termed “panning” techniques are described by way of example in Parmley and Smith, 1988, Gene 73:305-318; Fowlkes et al., 1992, BioTechniques 13:422-427; International Publication No. WO 94/18318; and in references cited herein.

[0847] In another embodiment, the two-hybrid system for selecting interacting proteins in yeast (Fields and Song, 1989, Nature 340:245-246; Chien et al., 1991, Proc. Natl. Acad. Sci. USA 88:9578-9582) can be used to identify molecules that specifically bind to ovarian and/or breast cancer antigen polypeptides or ovarian and/or breast cancer antigen-like polypeptides.

[0848] Where the ovarian and/or breast cancer antigen binding molecule is a polypeptide, the polypeptide can be conveniently selected from any peptide library, including random peptide libraries, combinatorial peptide libraries, or biased peptide libraries. The term “biased” is used herein to mean that the method of generating the library is manipulated so as to restrict one or more parameters that govern the diversity of the resulting collection of molecules, in this case peptides.

[0849] Thus, a truly random peptide library would generate a collection of peptides in which the probability of finding a particular amino acid at a given position of the peptide is the same for all 20 amino acids. A bias can be introduced into the library, however, by specifying, for example, that a lysine occur every fifth amino acid or that positions 4, 8, and 9 of a decapeptide library be fixed to include only arginine. Clearly, many types of biases can be contemplated, and the present invention is not restricted to any particular bias. Furthermore, the present invention contemplates specific types of peptide libraries, such as phage displayed peptide libraries and those that utilize a DNA construct comprising a lambda phage vector with a DNA insert.

[0850] As mentioned above, in the case of an ovarian and/or breast cancer antigen binding molecule that is a polypeptide, the polypeptide may have about 6 to less than about 60 amino acid residues, preferably about 6 to about 10 amino acid residues, and most preferably, about 6 to about 22 amino acids. In another embodiment, an ovarian and/or breast cancer antigen binding polypeptide has in the range of 15-100 amino acids, or 20-50 amino acids.

[0851] The selected ovarian and/or breast cancer antigen binding polypeptide can be obtained by chemical synthesis or recombinant expression.

[0852] Other Activities

[0853] A polypeptide, polynucleotide, agonist, or antagonist of the present invention, as a result of the ability to stimulate vascular endothelial cell growth, may be employed in treatment for stimulating re-vascularization of ischemic tissues due to various disease conditions such as thrombosis, arteriosclerosis, and other cardiovascular conditions. The polypeptide, polynucleotide, agonist, or antagonist of the present invention may also be employed to stimulate angiogenesis and limb regeneration, as discussed above.

[0854] A polypeptide, polynucleotide, agonist, or antagonist of the present invention may also be employed for treating wounds due to injuries, burns, post-operative tissue repair, and ulcers since they are mitogenic to various cells of different origins, such as fibroblast cells and skeletal muscle cells, and therefore, facilitate the repair or replacement of damaged or diseased tissue.

[0855] A polypeptide, polynucleotide, agonist, or antagonist of the present invention may also be employed to stimulate neuronal growth and to treat and prevent neuronal damage which occurs in certain neuronal disorders or neuro-degenerative conditions such as Alzheimer's disease, Parkinson's disease, and AIDS-related complex. A polypeptide, polynucleotide, agonist, or antagonist of the present invention may have the ability to stimulate chondrocyte growth; therefore, they may be employed to enhance bone and periodontal regeneration and aid in tissue transplants or bone grafts.

[0856] A polypeptide, polynucleotide, agonist, or antagonist of the present invention may be also be employed to prevent skin aging due to sunburn by stimulating keratinocyte growth.

[0857] A polypeptide, polynucleotide, agonist, or antagonist of the present invention may also be employed for preventing hair loss, since FGF family members activate hair-forming cells and promotes melanocyte growth. Along the same lines, a polypeptide, polynucleotide, agonist, or antagonist of the present invention may be employed to stimulate growth and differentiation of hematopoietic cells and bone marrow cells when used in combination with other cytokines.

[0858] A polypeptide, polynucleotide, agonist, or antagonist of the present invention may also be employed to maintain organs before transplantation or for supporting cell culture of primary tissues. A polypeptide, polynucleotide, agonist, or antagonist of the present invention may also be employed for inducing tissue of mesodermal origin to differentiate in early embryos.

[0859] A polypeptide, polynucleotide, agonist, or antagonist of the present invention may also increase or decrease the differentiation or proliferation of embryonic stem cells, besides, as discussed above, hematopoietic lineage.

[0860] A polypeptide, polynucleotide, agonist, or antagonist of the present invention may also be used to modulate mammalian characteristics, such as body height, weight, hair color, eye color, skin, percentage of adipose tissue, pigmentation, size, and shape (e.g., cosmetic surgery). Similarly, a polypeptide, polynucleotide, agonist, or antagonist of the present invention may be used to modulate mammalian metabolism affecting catabolism, anabolism, processing, utilization, and storage of energy.

[0861] A polypeptide, polynucleotide, agonist, or antagonist of the present invention, may be used to change a mammal's mental state or physical state by influencing biorhythms, caricadic rhythms, depression (including depressive disorders), tendency for violence, tolerance for pain, reproductive capabilities (preferably by Activin or Inhibin-like activity), hormonal or endocrine levels, appetite, libido, memory, stress, or other cognitive qualities.

[0862] A polypeptide, polynucleotide, agonist, or antagonist of the present invention may also be used as a food additive or preservative, such as to increase or decrease storage capabilities, fat content, lipid, protein, carbohydrate, vitamins, minerals, cofactors or other nutritional components.

[0863] The above-recited applications have uses in a wide variety of hosts. Such hosts include, but are not limited to, human, murine, rabbit, goat, guinea pig, camel, horse, mouse, rat, hamster, pig, micro-pig, chicken, goat, cow, sheep, dog, cat, non-human primate, and human. In specific embodiments, the host is a mouse, rabbit, goat, guinea pig, chicken, rat, hamster, pig, sheep, dog or cat. In preferred embodiments, the host is a mammal. In most preferred embodiments, the host is a human.

[0864] Other Preferred Embodiments

[0865] Other preferred embodiments of the claimed invention include an isolated nucleic acid molecule comprising a nucleotide sequence which is at least 95% identical to a sequence of at least about 50 contiguous nucleotides in the nucleotide sequence of SEQ ID NO:X or the complementary strand thereto, the nucleotide sequence as defined in column 4 of Table 1A or columns 8 and 9 of Table 2 or the complementary strand thereto, and/or cDNA contained in Clone ID NO:Z.

[0866] Also preferred is a nucleic acid molecule wherein said sequence of contiguous nucleotides is included in the nucleotide sequence of the portion of SEQ ID NO:X as defined in column 4, “ORF (From-To)”, in Table 1A.

[0867] Also preferred is a nucleic acid molecule wherein said sequence of contiguous nucleotides is included in the nucleotide sequence of the portion of SEQ ID NO:X as defined in columns 8 and 9, “NT From” and “NT To” respectively, in Table 2.

[0868] Also preferred is an isolated nucleic acid molecule comprising a nucleotide sequence which is at least 95% identical to a sequence of at least about 150 contiguous nucleotides in the nucleotide sequence of SEQ ID NO:X or the complementary strand thereto, the nucleotide sequence as defined in column 4 of Table 1A or columns 8 and 9 of Table 2 or the complementary strand thereto, and/or cDNA contained in Clone ID NO:Z.

[0869] Further preferred is an isolated nucleic acid molecule comprising a nucleotide sequence which is at least 95% identical to a sequence of at least about 500 contiguous nucleotides in the nucleotide sequence of SEQ ID NO:X or the complementary strand thereto, the nucleotide sequence as defined in column 4 of Table 1A or columns 8 and 9 of Table 2 or the complementary strand thereto, and/or cDNA contained in Clone ID NO:Z.

[0870] A further preferred embodiment is a nucleic acid molecule comprising a nucleotide sequence which is at least 95% identical to the nucleotide sequence of the portion of SEQ ID NO:X defined in column 4, “ORF (From-To)”, in Table 1A.

[0871] A further preferred embodiment is a nucleic acid molecule comprising a nucleotide sequence which is at least 95% identical to the nucleotide sequence of the portion of SEQ ID NO:X defined in columns 8 and 9, “NT From” and “NT To”, respectively, in Table 2.

[0872] A further preferred embodiment is an isolated nucleic acid molecule comprising a nucleotide sequence which is at least 95% identical to the complete nucleotide sequence of SEQ ID NO:X or the complementary strand thereto, the nucleotide sequence as defined in column 4 of Table 1A or columns 8 and 9 of Table 2 or the complementary strand thereto, and/or cDNA contained in Clone ID NO:Z.

[0873] Also preferred is an isolated nucleic acid molecule which hybridizes under stringent hybridization conditions to a nucleic acid molecule comprising a nucleotide sequence of SEQ ID NO:X or the complementary strand thereto, the nucleotide sequence as defined in column 4 of Table 1A or columns 8 and 9 of Table 2 or the complementary strand thereto, and/or cDNA contained in Clone ID NO:Z, wherein said nucleic acid molecule which hybridizes does not hybridize under stringent hybridization conditions to a nucleic acid molecule having a nucleotide sequence consisting of only A residues or of only T residues.

[0874] Also preferred is a composition of matter comprising a DNA molecule which comprises the cDNA contained in Clone ID NO:Z.

[0875] Also preferred is an isolated nucleic acid molecule comprising a nucleotide sequence which is at least 95% identical to a sequence of at least 50 contiguous nucleotides of the EDNA sequence contained in Clone ID NO:Z.

[0876] Also preferred is an isolated nucleic acid molecule, wherein said sequence of at least 50 contiguous nucleotides is included in the nucleotide sequence of an open reading frame sequence encoded by cDNA contained in Clone ID NO:Z.

[0877] Also preferred is an isolated nucleic acid molecule comprising a nucleotide sequence which is at least 95% identical to sequence of at least 150 contiguous nucleotides in the nucleotide sequence encoded by cDNA contained in Clone ID NO:Z.

[0878] A further preferred embodiment is an isolated nucleic acid molecule comprising a nucleotide sequence which is at least 95% identical to sequence of at least 500 contiguous nucleotides in the nucleotide sequence encoded by CDNA contained in Clone ID NO:Z.

[0879] A further preferred embodiment is an isolated nucleic acid molecule comprising a nucleotide sequence which is at least 95% identical to the complete nucleotide sequence encoded by cDNA contained in Clone ID NO:Z.

[0880] A further preferred embodiment is a method for detecting in a biological sample a nucleic acid molecule comprising a nucleotide sequence which is at least 95% identical to a sequence of at least 50 contiguous nucleotides in a sequence selected from the group consisting of: a nucleotide sequence of SEQ ID NO:X or the complementary strand thereto; the nucleotide sequence as defined in column 4 of Table 1A or columns 8 and 9 of Table 2 or the complementary strand thereto; and a nucleotide sequence encoded by cDNA contained in Clone ID NO:Z; which method comprises a step of comparing a nucleotide sequence of at least one nucleic acid molecule in said sample with a sequence selected from said group and determining whether the sequence of said nucleic acid molecule in said sample is at least 95% identical to said selected sequence.

[0881] Also preferred is the above method wherein said step of comparing sequences comprises determining the extent of nucleic acid hybridization between nucleic acid molecules in said sample and a nucleic acid molecule comprising said sequence selected from said group. Similarly, also preferred is the above method wherein said step of comparing sequences is performed by comparing the nucleotide sequence determined from a nucleic acid molecule in said sample with said sequence selected from said group. The nucleic acid molecules can comprise DNA molecules or RNA molecules.

[0882] A further preferred embodiment is a method for identifying the species, tissue or cell type of a biological sample which method comprises a step of detecting nucleic acid molecules in said sample, if any, comprising a nucleotide sequence that is at least 95% identical to a sequence of at least 50 contiguous nucleotides in a sequence selected from the group consisting of: a nucleotide sequence of SEQ ID NO:X or the complementary strand thereto; the nucleotide sequence as defined in column 4 of Table 1A or columns 8 and 9 of Table 2 or the complementary strand thereto; and a nucleotide sequence of the cDNA contained in Clone ID NO:Z.

[0883] The method for identifying the species, tissue or cell type of a biological sample can comprise a step of detecting nucleic acid molecules comprising a nucleotide sequence in a panel of at least two nucleotide sequences, wherein at least one sequence in said panel is at least 95% identical to a sequence of at least 50 contiguous nucleotides in a sequence selected from said group.

[0884] Also preferred is a method for diagnosing in a subject a pathological condition associated with abnormal structure or expression of a nucleotide sequence of SEQ ID NO:X or the complementary strand thereto; the nucleotide sequence as defined in column 4 of Table 1A or columns 8 and 9 of Table 2 or the complementary strand thereto; or the cDNA contained in Clone ID NO:Z which encodes a protein, wherein the method comprises a step of detecting in a biological sample obtained from said subject nucleic acid molecules, if any, comprising a nucleotide sequence that is at least 95% identical to a sequence of at least 50 contiguous nucleotides in a sequence selected from the group consisting of: a nucleotide sequence of SEQ ID NO:X or the complementary strand thereto; the nucleotide sequence as defined in column 4 of Table 1A or columns 8 and 9 of Table 2 or the complementary strand thereto; and a nucleotide sequence of cDNA contained in Clone ID NO:Z.

[0885] The method for diagnosing a pathological condition can comprise a step of detecting nucleic acid molecules comprising a nucleotide sequence in a panel of at least two nucleotide sequences, wherein at least one sequence in said panel is at least 95% identical to a sequence of at least 50 contiguous nucleotides in a sequence selected from said group.

[0886] Also preferred is a composition of matter comprising isolated nucleic acid molecules wherein the nucleotide sequences of said nucleic acid molecules comprise a panel of at least two nucleotide sequences, wherein at least one sequence in said panel is at least 95% identical to a sequence of at least 50 contiguous nucleotides in a sequence selected from the group consisting of: a nucleotide sequence of SEQ ID NO:X or the complementary strand thereto; the nucleotide sequence as defined in column 4 of Table 1A or columns 8 and 9 of Table 2 or the complementary strand thereto; and a nucleotide sequence encoded by cDNA contained in Clone ID NO:Z. The nucleic acid molecules can comprise DNA molecules or RNA molecules.

[0887] Also preferred is a composition of matter comprising isolated nucleic acid molecules wherein the nucleotide sequences of said nucleic acid molecules comprise a DNA microarray or “chip” of at least 1, 2, 3, 4, 5, 6, 7, 8, 9, 10, 15, 20, 25, 30, 40, 50, 100, 150, 200, 250, 300, 500, 1000, 2000, 3000, or 4000 nucleotide sequences, wherein at least one sequence in said DNA microarray or “chip” is at least 95% identical to a sequence of at least 50 contiguous nucleotides in a sequence selected from the group consisting of: a nucleotide sequence of SEQ -ID NO:X wherein X is any integer as defined in Table 1A; and a nucleotide sequence encoded by a human cDNA clone identified by a cDNA “Clone ID” in Table 1A.

[0888] Also preferred is an isolated polypeptide comprising an amino acid sequence at least 90% identical to a sequence of at least about 10 contiguous amino acids in the polypeptide sequence of SEQ ID NO:Y; a polypeptide encoded by SEQ ID NO:X or the complementary strand thereto; the polypeptide encoded by the nucleotide sequence as defined in columns 8 and 9 of Table 2; and/or a polypeptide encoded by cDNA contained in Clone ID NO:Z.

[0889] Also preferred is an isolated polypeptide comprising an amino acid sequence at least 95% identical to a sequence of at least about 30 contiguous amino acids in the amino acid sequence of SEQ ID NO:Y; a polypeptide encoded by SEQ ID NO:X or the complementary strand thereto; the polypeptide encoded by the nucleotide sequence as defined in columns 8 and 9 of Table 2; and/or a polypeptide encoded by cDNA contained in Clone ID NO:Z.

[0890] Further preferred is an isolated polypeptide comprising an amino acid sequence at least 95% identical to a sequence of at least about 100 contiguous amino acids in the amino acid sequence of SEQ ID NO:Y; a polypeptide encoded by SEQ ID NO:X or the complementary strand thereto; the polypeptide encoded by the nucleotide sequence as defined in columns 8 and 9 of Table 2; and/or a polypeptide encoded by cDNA contained in Clone ID NO:Z.

[0891] Further preferred is an isolated polypeptide comprising an amino acid sequence at least 95% identical to the complete amino acid sequence of SEQ ID NO:Y; a polypeptide encoded by SEQ ID NO:X or the complementary strand thereto; the polypeptide encoded by the nucleotide sequence as defined in columns 8 and 9 of Table 2; and/or a polypeptide encoded by cDNA contained in Clone ID NO:Z.

[0892] Further preferred is an isolated polypeptide comprising an amino acid sequence at least 90% identical to a sequence of at least about 10 contiguous amino acids in the complete amino acid sequence of a polypeptide encoded by contained in Clone ID NO:Z

[0893] Also preferred is a polypeptide wherein said sequence of contiguous amino acids is included in the amino acid sequence of a portion of said polypeptide encoded by cDNA contained in Clone ID NO:Z; a polypeptide encoded by SEQ ID NO:X or the complementary strand thereto; the polypeptide encoded by the nucleotide sequence as defined in columns 8 and 9 of Table 2; and/or the polypeptide sequence of SEQ ID NO:Y.

[0894] Also preferred is an isolated polypeptide comprising an amino acid sequence at least 95% identical to a sequence of at least about 30 contiguous amino acids in the amino acid sequence of a polypeptide encoded by the cDNA contained in Clone ID NO:Z.

[0895] Also preferred is an isolated polypeptide comprising an amino acid sequence at least 95% identical to a sequence of at least about 100 contiguous amino acids in the amino acid sequence of a polypeptide encoded by cDNA contained in Clone ID NO:Z.

[0896] Also preferred is an isolated polypeptide comprising an amino acid sequence at least 95% identical to the amino acid sequence of a polypeptide encoded by the cDNA contained in Clone ID NO:Z.

[0897] Further preferred is an isolated antibody which binds specifically to a polypeptide comprising an amino acid sequence that is at least 90% identical to a sequence of at least 10 contiguous amino acids in a sequence selected from the group consisting of: a polypeptide sequence of SEQ ID NO:Y; a polypeptide encoded by SEQ ID NO:X or the complementary strand thereto; the polypeptide encoded by the nucleotide sequence as defined in columns 8 and 9 of Table 2; and a polypeptide encoded by the cDNA contained in Clone ID NO:Z.

[0898] Further preferred is a method for detecting in a biological sample a polypeptide comprising an amino acid sequence which is at least 90% identical to a sequence of at least 10 contiguous amino acids in a sequence selected from the group consisting of: a polypeptide sequence of SEQ ID NO:Y; a polypeptide encoded by SEQ ID NO:X or the complementary strand thereto; the polypeptide encoded by the nucleotide sequence as defined in columns 8 and 9 of Table 2; and a polypeptide encoded by the cDNA contained in Clone ID NO:Z; which method comprises a step of comparing an amino acid sequence of at least one polypeptide molecule in said sample with a sequence selected from said group and determining whether the sequence of said polypeptide molecule in said sample is at least 90% identical to said sequence of at least 10 contiguous amino acids.

[0899] Also preferred is the above method wherein said step of comparing an amino acid sequence of at least one polypeptide molecule in said sample with a sequence selected from said group comprises determining the extent of specific binding of polypeptides in said sample to an antibody which binds specifically to a polypeptide comprising an amino acid sequence that is at least 90% identical to a sequence of at least 10 contiguous amino acids in a sequence selected from the group consisting of: a polypeptide sequence of SEQ ID NO:Y; a polypeptide encoded by SEQ ID NO:X or the complementary strand thereto; the polypeptide encoded by the nucleotide sequence as defined in columns 8 and 9 of Table 2; and a polypeptide encoded by the cDNA contained in Clone ID NO:Z.

[0900] Also preferred is the above method wherein said step of comparing sequences is performed by comparing the amino acid sequence determined from a polypeptide molecule in said sample with said sequence selected from said group.

[0901] Also preferred is a method for identifying the species, tissue or cell type of a biological sample which method comprises a step of detecting polypeptide molecules in said sample, if any, comprising an amino acid sequence that is at least 90% identical to a sequence of at least 10 contiguous amino acids in a sequence selected from the group consisting of: polypeptide sequence of SEQ ID NO:Y; a polypeptide encoded by SEQ ID NO:X or the complementary strand thereto; the polypeptide encoded by the nucleotide sequence as defined in columns 8 and 9 of Table 2; and a polypeptide encoded by the cDNA contained in Clone ID NO:Z.

[0902] Also preferred is the above method for identifying the species, tissue or cell type of a biological sample, which method comprises a step of detecting polypeptide molecules comprising an amino acid sequence in a panel of at least two amino acid sequences, wherein at least one sequence in said panel is at least 90% identical to a sequence of at least 10 contiguous amino acids in a sequence selected from the above group.

[0903] Also preferred is a method for diagnosing in a subject a pathological condition associated with abnormal structure or expression of a nucleic acid sequence identified in Table 1A or Table 2 encoding a polypeptide, which method comprises a step of detecting in a biological sample obtained from said subject polypeptide molecules comprising an amino acid sequence in a panel of at least two amino acid sequences, wherein at least one sequence in said panel is at least 90% identical to a sequence of at least 10 contiguous amino acids in a sequence selected from the group consisting of: polypeptide sequence of SEQ ID NO:Y; a polypeptide encoded by SEQ ID NO:X or the complementary strand thereto; the polypeptide encoded by the nucleotide sequence as defined in columns 8 and 9 of Table 2; and a polypeptide encoded by the cDNA contained in Clone ID NO:Z.

[0904] In any of these methods, the step of detecting said potypeptide molecules includes using an antibody.

[0905] Also preferred is an isolated nucleic acid molecule comprising a nucleotide sequence which is at least 95% identical to a nucleotide sequence encoding a polypeptide wherein said polypeptide comprises an amino acid sequence that is at least 90% identical to a sequence of at least 10 contiguous amino acids in a sequence selected from the group consisting of: polypeptide sequence of SEQ ID NO:Y; a polypeptide encoded by SEQ ID NO:X or the complementary strand thereto; the polypeptide encoded by the nucleotide sequence as defined in columns 8 and 9 of Table 2; and a polypeptide encoded by the cDNA contained in Clone ID NO:Z.

[0906] Also preferred is an isolated nucleic acid molecule, wherein said nucleotide sequence encoding a polypeptide has been optimized for expression of said polypeptide in a prokaryotic host.

[0907] Also preferred is a polypeptide molecule, wherein said polypeptide comprises an amino acid sequence selected from the group consisting of: polypeptide sequence of SEQ ID NO:Y; a polypeptide encoded by SEQ ID NO:X or the complementary strand thereto; the polypeptide encoded by the nucleotide sequence as defined in columns 8 and 9 of Table 2; and a polypeptide encoded by the cDNA contained in Clone ID NO:Z.

[0908] Further preferred is a method of making a recombinant vector comprising inserting any of the above isolated nucleic acid molecule into a vector. Also preferred is the recombinant vector produced by this method. Also preferred is a method of making a recombinant host cell comprising introducing the vector into a host cell, as well as the recombinant host cell produced by this method.

[0909] Also preferred is a method of making an isolated polypeptide comprising culturing this recombinant host cell under conditions such that said polypeptide is expressed and recovering said polypeptide. Also preferred is this method of making an isolated polypeptide, wherein said recombinant host cell is a eukaryotic cell and said polypeptide is a human protein comprising an amino acid sequence selected from the group consisting of: polypeptide sequence of SEQ ID NO:Y; a polypeptide encoded by SEQ ID NO:X or the complementary strand thereto; the polypeptide encoded by the nucleotide sequence as defined in columns 8 and 9 of Table 2; and a polypeptide encoded by the cDNA contained in Clone ID NO:Z. The isolated polypeptide produced by this method is also preferred.

[0910] Also preferred is a method of treatment of an individual in need of an increased level of a protein activity, which method comprises administering to such an individual a Therapeutic comprising an amount of an isolated polypeptide, polynucleotide, immunogenic fragment or analogue thereof, binding agent, antibody, or antigen binding fragment of the claimed invention effective to increase the level of said protein activity in said individual.

[0911] Also preferred is a method of treatment of an individual in need of a decreased level of a protein activity, which method comprised administering to such an individual a Therapeutic comprising an amount of an isolated polypeptide, polynucleotide, immunogenic fragment or analogue thereof, binding agent, antibody, or antigen binding fragment of the claimed invention effective to decrease the level of said protein activity in said individual.

[0912] Also preferred is a method of treatment of an individual in need of a specific delivery of toxic compositions to diseased cells (e.g., tumors, leukemias or lymphomas), which method comprises administering to such an individual a Therapeutic comprising an amount of an isolated polypeptide of the invention, including, but not limited to a binding agent, or antibody of the claimed invention that are associated with toxin or cytotoxic prodrugs.

[0913] Having generally described the invention, the same will be more readily understood by reference to the following examples, which are provided by way of illustration and are not intended as limiting.

TABLE 6

| ATCC Deposits | Deposit Date | ATCC Designation Number |
|---|---|---|
| LP01, LP02, LP03, | May 20, 1997 | 209059, 209060, 209061, 209062, |
| LP04, LP05, LP06, | | 209063, 209064, 209065, 209066, |
| LP07, LP08, LP09, | | 209067, 209068, 209069 |
| LP10, LP11, | | |
| LP12 | Jan. 12, 1998 | 209579 |
| LP13 | Jan. 12, 1998 | 209578 |
| LP14 | Jul. 16, 1998 | 203067 |
| LP15 | Jul. 16, 1998 | 203068 |
| LP16 | Feb. 1, 1999 | 203609 |
| LP17 | Feb. 1, 1999 | 203610 |
| LP20 | Nov. 17, 1998 | 203485 |
| LP21 | Jun. 18, 1999 | PTA-252 |
| LP22 | Jun. 18, 1999 | PTA-253 |
| LP23 | Dec. 22, 1999 | PTA-1081 |

### EXAMPLES

### Example 1

### Isolation of a Selected cDNA Clone from the Deposited Sample

[0914] Each Clone ID NO:Z is contained in a plasmid. Table 7 identifies the vectors used to construct the cDNA library from which each clone was isolated. In many cases, the vector used to construct the library is a phage vector from which a plasmid has been excised. The following correlates the related plasmid for each phage vector used in constructing the cDNA library. For example, where a particular clone is identified in Table 7 as being isolated in the vector “Lambda Zap,” the corresponding deposited clone is in “pBluescript.”

| Vector Used to Construct Library | Corresponding Deposited Plasmid |
|---|---|
| Lambda Zap | pBluescript (pBS) |
| Uni-Zap XR | pBluescript (pBS) |
| Zap Express | pBK |
| lafmid BA | plafmid BA |
| pSport1 | pSport1 |
| pCMVSport 2.0 | pCMVSport 2.0 |
| pCMVSport 3.0 | pCMVSport 3.0 |
| pCR ® 2.1 | pCR ® 2.1 |

[0915] Vectors Lambda Zap (U.S. Pat. Nos. 5,128,256 and 5,286,636), Uni-Zap XR (U.S. Pat. Nos. 5,128, 256 and 5,286,636), Zap Express (U.S. Pat. Nos. 5,128,256 and 5,286,636), pBluescript (pBS) (Short, J. M. et al., Nucleic Acids Res. 16:7583-7600 (1988); Alting-Mees, M. A. and Short, J. M., Nucleic Acids Res. 17:9494 (1989)) and pBK (Alting-Mees, M. A. et al., Strategies 5:58-61 (1992)) are commercially available from Stratagene Cloning Systems, Inc., 11011 N. Torrey Pines Road, La Jolla, Calif., 92037. pBS contains an ampicillin resistance gene and pBK contains a neomycin resistance gene. Both can be transformed into E. coli strain XL-1 Blue, also available from Stratagene. pBS comes in 4 forms SK+, SK−, KS+ and KS. The S and K refers to the orientation of the polylinker to the T7 and T3 primer sequences which flank the polylinker region (“S” is for SacI and “K” is for KpnI which are the first sites on each respective end of the linker). “+” or “−” refer to the orientation of the fl origin of replication (“ori”), such that in one orientation, single stranded rescue initiated from the fl ori generates sense strand DNA and in the other, antisense.

[0916] Vectors pSport1, pCMVSport 2.0 and pCMVSport 3.0, were obtained from Life Technologies, Inc., P. O. Box 6009, Gaithersburg, Md. 20897. All Sport vectors contain an ampicillin resistance gene and may be transformed into E. coli strain DH10B, also available from Life Technologies. (See, for instance, Gruber, C. E., et al., Focus 15:59 (1993).) Vector lafmid BA (Bento Soares, Columbia University, NY) contains an ampicillin resistance gene and can be transformed into E. coli strain XL-1 Blue. Vector pCR®2.1, which is available from Invitrogen, 1600 Faraday Avenue, Carlsbad, Calif. 92008, contains an ampicillin resistance gene and may be transformed into E. coli strain DH10B, available from Life Technologies. (See, for instance, Clark, J. M., Nuc. Acids Res. 16:9677-9686 (1988) and Mead, D. et al., Bio/Technology 9: (1991).) Preferably, a polynucleotide of the present invention does not comprise the vector sequences identified for the particular clone in Table 7, as well as the corresponding plasmid vector sequences designated above.

[0917] The deposited material in the sample assigned the ATCC Deposit Number cited by reference to Tables 1A, 2, 6 and 7 for any given cDNA clone also may contain one or more additional plasmids, each comprising a CDNA clone different from that given clone. Thus, deposits sharing the same ATCC Deposit Number contain at least a plasmid for each Clone ID NO:Z.

TABLE 7

| Libraries | | | ATCC |
|---|---|---|---|
| owned by Catalog | Catalog Description | Vector | Deposit |
| HUKA HUKB HUKC | Human Uterine Cancer | Lambda ZAP II | LP01 |
| HUKD HUKE HUKF | | | |
| HUKG | | | |
| HCNA HCNB | Human Colon | Lambda Zap II | LP01 |
| HFFA | Human Fetal Brain, | Lambda Zap II | LP01 |
| | random primed | | |
| HTWA | Resting T-Cell | Lambda ZAP II | LP01 |
| HBQA | Early Stage Human | Lambda ZAP II | LP01 |
| | Brain, random primed | | |
| HLMB HLMF HLMG | breast lymph node | Lambda ZAP II | LP01 |
| HLMH HLMI HLMJ | CDNA library | | |
| HLMM HLMN | | | |
| HCQA HCQB | human colon cancer | Lamda ZAP II | LP01 |
| HMEA HMEC HMED | Human Microvascular | Lambda ZAP II | LP01 |
| HMEE HMEF HMEG | Endothelial Cells, | | |
| HMEI HMEJ HMEK | fract. A | | |
| HMEL | | | |
| HUSA HUSC | Human Umbilical | Lambda ZAP II | LP01 |
| | Vein Endothelial | | |
| | Cells, fract. A | | |
| HLQA HLQB | Hepatocellular Tumor | Lambda ZAP II | LP01 |
| HHGA HHGB HHGC | Hemangiopericytoma | Lambda ZAP II | LP01 |
| HHGD | | | |
| HSDM | Human Striatum | Lambda ZAP II | LP01 |
| | Depression, re-rescue | | |
| HUSH | H Umbilical Vein | Lambda ZAP II | LP01 |
| | Endothelial Cells, | | |
| | frac A, re-excision | | |
| HSGS | Salivary gland, | Lambda ZAP II | LP01 |
| | subtracted | | |
| HFXA HFXB HFXC | Brain frontal cortex | Lambda ZAP II | LP01 |
| HFXD HFXE HFXF | | | |
| HFXG HFXH | | | |
| HPQA HPQB HPQC | PERM TF274 | Lambda ZAP II | LP01 |
| HFXJ HFXK | Brain Frontal Cortex, | Lambda ZAP II | LP01 |
| | re-excision | | |
| HCWA HCWB | CD34 positive cells | ZAP Express | LP02 |
| HCWC HCWD | (Cord Blood) | | |
| HCWE HCWF | | | |
| HCWG HCWH HCWI | | | |
| HCWJ HCWK | | | |
| HCUA HCUB HCUC | CD34 depleted Buffy | ZAP Express | LP02 |
| | Coat (Cord Blood) | | |
| HRSM | A-14 cell line | ZAP Express | LP02 |
| HRSA | A1-CELL LINE | ZAP Express | LP02 |
| HCUD HCUE HCUF | CD34 depleted Buffy | ZAP Express | LP02 |
| HCUG HCUH HCUI | Coat (Cord Blood), | | |
| | re-excision | | |
| HBXE HBXF HBXG | H. Whole Brain #2, | ZAP Express | LP02 |
| | re-excision | | |
| HRLM | L8 cell line | ZAP Express | LP02 |
| HBXA HBXB HBXC | Human Whole Brain | ZAP Express | LP02 |
| HBXD | #2—Oligo dT >1.5 Kb | | |
| HUDA HUDB HUDC | Testes | ZAP Express | LP02 |
| HHTM HHTN HHTO | H. hypothalamus, frac | ZAP Express | LP02 |
| | A; re-excision | | |
| HHTL | H. hypothalamus, | ZAP Express | LP02 |
| | frac A | | |
| HASA HASD | Human Adult Spleen | Uni-ZAP XR | LP03 |
| HFKC HFKD HFKE | Human Fetal Kidney | Uni-ZAP XR | LP03 |
| HFKF HFKG | | | |
| HE8A HE8B HE8C | Human 8 Week Whole | Uni-ZAP XR | LP03 |
| HE8D HE8E HE8F | Embryo | | |
| HE8M HE8N | | | |
| HGBA HGBD HGBE | Human Gall Bladder | Uni-ZAP XR | LP03 |
| HGBF HGBG HGBH | | | |
| HGBI | | | |
| HLHA HLHB HLHC | Human Fetal Lung III | Uni-ZAP XR | LP03 |
| HLHD HLHE HLHF | | | |
| HLHG HLHH HLH | | | |
| HPMA HPMB HPMC | Human Placenta | Uni-ZAP XR | LP03 |
| HPMD HPME HPMF | | | |
| HPMG HPMH | | | |
| HPRA HPRB HPRC | Human Prostate | Uni-ZAP XR | LP03 |
| HPRD | | | |
| HSIA HSIC HSID | Human Adult Small | Uni-ZAP XR | LP03 |
| HSIE | Intestine | | |
| HTEA HTEB HTEC | Human Testes | Uni-ZAP XR | LP03 |
| HTED HTEE HTEF | | | |
| HTEG HTEH HTEI | | | |
| HTEJ HTEK | | | |
| HTPA HTPB HTPC | Human Pancreas | Uni-ZAP XR | LP03 |
| HTPD HTPE | Tumor | | |
| HTTA HTTB HTTC | Human Testes Tumor | Uni-ZAP XR | LP03 |
| HTTD HTTE HTTF | | | |
| HAPA HAPB HAPC | Human Adult | Uni-ZAP XR | LP03 |
| HAPM | Pulmonary | | |
| HETA HETB HETC | Human Endometrial | Uni-ZAP XR | LP03 |
| HETD HETE HETF | Tumor | | |
| HETG HETH HETI | | | |
| HHFB HHFC HHFD | Human Fetal Heart | Uni-ZAP XR | LP03 |
| HHFE HHFF HHFG | | | |
| HHFH HHFI | | | |
| HHPB HHPC HHPD | Human Hippocampus | Uni-ZAP XR | LP03 |
| HHPE HHPF HHPG | | | |
| HHPH | | | |
| HCE1 HCE2 HCE3 | Human Cerebellum | Uni-ZAP XR | LP03 |
| HCE4 HCE5 HCEB | | | |
| HCEC HCED HCEE | | | |
| HCEF HCEG | | | |
| HUVB HUVC HUVD | Human Umbilical | Uni-ZAP XR | LP03 |
| HUVE | Vein, Endo. remake | | |
| HSTA HSTB HSTC | Human Skin Tumor | Uni-ZAP XR | LP03 |
| HSTD | | | |
| HTAA HTAB HTAC | Human Activated | Uni-ZAP XR | LP03 |
| HTAD HTAE | T-Cells | | |
| HFEA HFEB HFEC | Human Fetal | Uni-ZAP XR | LP03 |
| | Epithelium (Skin) | | |
| HJPA HJPB HJPC | HUMAN JURKAT | Uni-ZAP XR | LP03 |
| HJPD | MEMBRANE | | |
| | BOUND | | |
| | POLYSOMES | | |
| HESA | Human epithelioid | Uni-Zap XR | LP03 |
| | sarcoma | | |
| HLTA HLTB HLTC | Human T-Cell | Uni-ZAP XR | LP03 |
| HLTD HLTE HLTF | Lymphoma | | |
| HFTA HFTB HFTC | Human Fetal Dura | Uni-ZAP XR | LP03 |
| HFTD | Mater | | |
| HRDA HRDB HRDC | Human | Uni-ZAP XR | LP03 |
| HRDD HRDE HRDF | Rhabdomyosarcoma | | |
| HCAA HCAB HCAC | Gem cells cyclo- | Uni-ZAP XR | LP03 |
| | hexamide treated | | |
| HRGA HRGB HRGC | Raji Cells, cyclo- | Uni-ZAP XR | LP03 |
| HRGD | hexamide treated | | |
| HSUA HSUB HSUC | Supt Cells, cyclo- | Uni-ZAP XR | LP03 |
| HSUM | hexamide treated | | |
| HT4A HT4C HT4D | Activated T-Cells, | Uni-ZAP XR | LP03 |
| | 12 hrs. | | |
| HE9A HE9B HE9C | Nine Week Old Early | Uni-ZAP XR | LP03 |
| HE9D HE9E HE9F | Stage Human | | |
| HE9G HE9H HE9M | | | |
| HE9N | | | |
| HATA HATB HATC | Human Adrenal Gland | Uni-ZAP XR | LP03 |
| HATD HATE | Tumor | | |
| HT5A | Activated T-Cells, | Uni-ZAP XR | LP03 |
| | 24 hrs. | | |
| HFGA HFGM | Human Fetal Brain | Uni-ZAP XR | LP03 |
| HNEA HNEB HNEC | Human Neutrophil | Uni-ZAP XR | LP03 |
| HNED HNEE | | | |
| HBGB HBGD | Human Primary Breast | Uni-ZAP XR | LP03 |
| | Cancer | | |
| HBNA HBNB | Human Normal Breast | Uni-ZAP XR | LP03 |
| HCAS | Gem Cells, cyclo- | Uni-ZAP XR | LP03 |
| | hexamide treated, | | |
| | subtra | | |
| HHPS | Human Hippocampus, | pBS | LP03 |
| | subtracted | | |
| HKCS HKCU | Human Colon Cancer, | pBS | LP03 |
| | subtracted | | |
| HRGS | Raji cells, cyclo- | pBS | LP03 |
| | hexamide treated, | | |
| | subtracted | | |
| HSUT | Supt cells, cyclo- | pBS | LP03 |
| | hexamide treated, | | |
| | differentially | | |
| | expressed | | |
| HT4S | Activated T-Cells, | Uni-ZAP XR | LP03 |
| | 12 hrs, subtracted | | |
| HCDA HCDB HCDC | Human | Uni-ZAP XR | LP03 |
| HCDD HGDE | Chondrosarcoma | | |
| HOAA HOAB HOAC | Human Osteosarcoma | Uni-ZAP XR | LP03 |
| HTLA HTLB HTLC | Human adult testis, | Uni-ZAP XR | LP03 |
| HTLD HTLE HTLF | large inserts | | |
| HLMA HLMC HLMD | Breast Lymph node | Un-ZAP XR | LP03 |
| | cDNA library | | |
| H6EA H6EB H6EC | HL-60, PMA 4H | Uni-ZAP XR | LP03 |
| HTXA HTXB HTXC | Activated T-Cell | Uni-ZAP XR | LP03 |
| HTXD HTXE HTXF | (12 hs)/Thiouridine | | |
| HTXG HTXH | labelledEco | | |
| HNFA HNFB HNFC | Human Neutrophil, | Uni-ZAP XR | LP03 |
| HNFD HNFE HNFF | Activated | | |
| HNFG HNFH HNFJ | | | |
| HTOB HTOC | HUMAN TONSILS, | Uni-ZAP XR | LP03 |
| | FRACTION 2 | | |
| HMGB | Human OB MG63 | Uni-ZAP XR | LP03 |
| | control fraction | | |
| HOPB | Human OB HOS | Uni-ZAP XR | LP03 |
| | control fraction I | | |
| HORB | Human OB HOS | Uni-ZAP XR | LP03 |
| | treated (10 nM E2) | | |
| | fraction I | | |
| HSVA HSVB HSVC | Human Chronic | Uni-ZAP XR | LP03 |
| | Synovitis | | |
| HROA | HUMAN STOMACH | Uni-ZAP XR | LP03 |
| HBJA HBJB HBJC | HUMAN B CELL | Uni-ZAP XR | LP03 |
| HBJD HBJE HBJF | LYMPHOMA | | |
| HBJG HBJH HBJI | | | |
| HBJJ HBJK | | | |
| HCRA HCRB HCRC | human corpus colosum | Uni-ZAP XR | LP03 |
| HODA HODB HODC | human ovarian cancer | Uni-ZAP XR | LP03 |
| HODD | | | |
| HDSA | Dermatofibrosarcoma | Uni-ZAP XR | LP03 |
| | Protuberance | | |
| HMWA HMWB | Bone Marrow Cell | Uni-ZAP XR | LP03 |
| HMWC HMWD | Line (RS4;11) | | |
| HMWE HMWF | | | |
| HMWG HMWH | | | |
| HMWI HMWJ | | | |
| HSOA | stomach cancer | Uni-ZAP XR | LP03 |
| | (human) | | |
| HERA | SKIN | Uni-ZAP XR | LP03 |
| HMDA | Brain- | Uni-ZAP XR | LP03 |
| | medulloblastoma | | |
| HGLA HGLB HGLD | Glioblastoma | Uni-ZAP XR | LP03 |
| HEAA | H. Atrophic | Uni-ZAP XR | LP03 |
| | Endometrium | | |
| HBCA HBCB | H. Lymph node breast | Uni-ZAP XR | LP03 |
| | Cancer | | |
| HPWT | Human Prostate BPH, | Uni-ZAP XR | LP03 |
| | re-excision | | |
| HFVG HFVH HFVI | Fetal Liver, | pBS | LP03 |
| | subtraction II | | |
| HNFI | Human Neutrophils, | pBS | LP03 |
| | Activated, re-excision | | |
| HBMB HBMC | Human Bone Marrow, | pBS | LP03 |
| HBMD | re-excision | | |
| HKML HKMM | H. Kidney Medulla, | pBS | LP03 |
| HKMN | re-excision | | |
| HKIX HKIY | H. Kidney Cortex, | pBS | LP03 |
| | subtracted | | |
| HADT | H. Amygdala | pBS | LP03 |
| | Depression, subtracted | | |
| H6AS | HI-60, untreated, | Uni-ZAP XR | LP03 |
| | subtracted | | |
| H6ES | HL-60, PMA 4H, | Uni-ZAP XR | LP03 |
| | subtracted | | |
| H6BS | HL-60, RA 4h, | Uni-ZAP XR | LP03 |
| | Subtracted | | |
| H6CS | HL-60, PMA 1d, | Uni-ZAP XR | LP03 |
| | subtracted | | |
| HTXJ HTXK | Activated T-cell | Uni-ZAP XR | LP03 |
| | (12 h)/Thiouridine- | | |
| | re-excision | | |
| HMSA HMSB HMSC | Monocyte activated | Uni-ZAP XR | LP03 |
| HMSD HMSE HMSF | | | |
| HMSG HMSH HMSI | | | |
| HMSJ HMSK | | | |
| HAGA HAGB HAUC | Human Amygdala | Uni-ZAP XR | LP03 |
| HAGD HAGE HAGF | | | |
| HSRA HSRB HSRE | STROMAL- | Uni-ZAP XR | LP03 |
| | OSTEOCLASTOMA | | |
| HSRD HSRF HSRG | Human Osteoclastoma | Uni-ZAP XR | LP03 |
| HSRH | Stromal Cells— | | |
| | unamplified | | |
| HSQA HSQB HSQC | Stromal cell TF274 | Uni-ZAP XR | LP03 |
| HSQD HSQE HSQF | | | |
| HSQG | | | |
| HSKA HSKB HSKC | Smooth muscle, serum | Uni-ZAP XR | LP03 |
| HSKD HSKE HSKF | treated | | |
| HSKZ | | | |
| HSLA HSLB HSLC | Smooth muscle, | Uni-ZAP XR | LP03 |
| HSLD HSLE HSLF | control | | |
| HSLG | | | |
| HSDA HSDD HSDE | Spinal cord | Uni-ZAP XR | LP03 |
| HSDF HSDG HSDH | | | |
| HPWS | Prostate-BPH | pBS | LP03 |
| | subtracted II | | |
| HSKW HSKX HSKY | Smooth Muscle— | pBS | LP03 |
| | HASTE normalized | | |
| HFPB HFPC HFPD | H. Frontal cortex, | Uni-ZAP XR | LP03 |
| | epileptic; re-excision | | |
| HSDI HSDJ HSDK | Spinal Cord, | Uni-ZAP XR | LP03 |
| | re-excision | | |
| HSKN HSKO | Smooth Muscle Serum | pBS | LP03 |
| | Treated, Norm | | |
| HSKG HSKH HSKI | Smooth muscle, serum | pBS | LP03 |
| | induced, re-exc | | |
| HFCA HFCB HFCC | Human Fetal Brain | Uni-ZAP XR | LP04 |
| HFCD HFCE HFCF | | | |
| HPTA HPTB HPTD | Human Pituitary | Uni-ZAP XR | LP04 |
| HTHB HTHC HTHD | Human Thymus | Uni-ZAP XR | LP04 |
| HE6B HE6C HE6D | Human Whole Six | Uni-ZAP XR | LP04 |
| HE6E HE6F HE6G | Week Old Embryo | | |
| HE6S | | | |
| HSSA HSSB HSSC | Human Synovial | Uni-ZAP XR | LP04 |
| HSSD HSSE HSSF | Sarcoma | | |
| HSSG HSSH HSSL | | | |
| HSSJ HSSK | | | |
| HE7T | 7 Week Old Early | Uni-ZAP XR | LP04 |
| | Stage Human, | | |
| | subtracted | | |
| HEPA HEPB HEPC | Human Epididymus | Uni-ZAP XR | LP04 |
| HSNA HSNB HSNC | Human Synovium | Uni-ZAP XR | LP04 |
| HSNM HSNN | | | |
| HPFB HPFC HPFD | Human Prostate | Uni-ZAP XR | LP04 |
| HPFE | Cancer, Stage C | | |
| | fraction | | |
| HE2A HE2D HE2E | 12 Week Old Early | Uni-ZAP XR | LP04 |
| HE2H HE2I HE2M | Stage Human | | |
| HE2N HE2O | | | |
| HE2B HE2C HE2F | 12 Week Old Early | Uni-ZAP XR | LP04 |
| HE2G HE2P HE2Q | Stage Human, II | | |
| HPTS HPTT HPTU | Human Pituitary, | Uni-ZAP XR | LP04 |
| | subtracted | | |
| HAUA HAUB HAUC | Amniotic Cells— | Uni-ZAP XR | LP04 |
| | TNF induced | | |
| HAQA HAQB HAQC | Amniotic Cells— | Uni-ZAP XR | LP04 |
| HAQD | Primary Culture | | |
| HWTA HWTB | wilm's tumor | Uni-ZAP XR | LP04 |
| HWTC | | | |
| HBSD | Bone Cancer, | Uni-ZAP XR | LP04 |
| | re-excision | | |
| HSGB | Salivary gland, | Uni-ZAP XR | LP04 |
| | re-excision | | |
| HSJA HSJB HSJC | Smooth muscle— | Uni-ZAP XR | LP04 |
| | ILb induced | | |
| HSXA HSXB HSXC | Human Substantia | Uni-ZAP XR | LP04 |
| HSXD | Nigra | | |
| HSHA HSHB HSHC | Smooth muscle, | Uni-ZAP XR | LP04 |
| | IL1b induced | | |
| HOUA HOUB HOUC | Adipocytes | Uni-ZAP XR | LP04 |
| HOUD HOUE | | | |
| HPWA HPWB HPWC | Prostate BPH | Uni-ZAP XR | LP04 |
| HPWD HPWE | | | |
| HELA HELB HELC | Endothelial cells— | Uni-ZAP XR | LP04 |
| HELD HELE HELF | control | | |
| HELG HELH | | | |
| HEMA HEMB HEMC | Endothelial—induced | Uni-ZAP XR | LP04 |
| HEMD HEME HEMF | | | |
| HEMG HEMH | | | |
| HBIA HBIB HBIC | Human Brain, | Uni-ZAP XR | LP04 |
| | Striatum | | |
| HHSA HHSB HHSC | Humam Hypothalmus, | Uni-ZAP XR | LP04 |
| HHSD HHSE | Schizophrema | | |
| HNGA HNGB HNGC | neutrophils control | Uni-ZAP XR | LP04 |
| HNGD HNGE HNGF | | | |
| HNGG HNGH HNGI | | | |
| HNGJ | | | |
| HNHA HNHB HNHC | Neutrophils IL-I and | Uni-ZAP XR | LP04 |
| HNHD HNHE HNHF | LPS induced | | |
| HNHG HNHH HNHI | | | |
| HNHJ | | | |
| HSDB HSDC | STRIATUM | Uni-ZAP XR | LP04 |
| | DEPRESSION | | |
| HHPT | Hypothalamus | Uni-ZAP XR | LP04 |
| HSAT HSAU HSAV | Anergic T-cell | Uni-ZAP XR | LP04 |
| HSAW HSAX HSAY | | | |
| HSAZ | | | |
| HBMS HBMT HBMU | Bone marrow | Uni-ZAP XR | LP04 |
| HBMV HBMW | | | |
| HBMX | | | |
| HOEA HOEB HOEC | Osteoblasts | Uni-ZAP XR | LP04 |
| HOED HOFE HOEF | | | |
| HOEJ | | | |
| HAIA HAIB HAIC | Epithelial—TNFa and | Uni-ZAP XR | LP04 |
| HAID HAIE HAIF | INF induced | | |
| HTGA HTGB HTGC | Apoptotic T-cell | Uni-ZAP XR | LP04 |
| HTGD | | | |
| HMCA HMCB | Macrophage-oxLDL | Uni-ZAP XR | LP04 |
| HMCC HMCD | | | |
| HMAA HMAB | Macrophage (GM-CSF | Uni-ZAP XR | LP04 |
| HMAC HMAD | treated) | | |
| HPHA | Normal Prostate | Uni-ZAP XR | LP04 |
| HPIA HPIB HPIC | LNCAP prostate cell | Uni-ZAP XR | LP04 |
| | line | | |
| HPJA HPJB HPJC | PC3 Prostate cell line | Uni-ZAP XR | LP04 |
| HOSE HOSF HOSG | Human Osteoclastoma, | Uni-ZAP XR | LP04 |
| | re-excision | | |
| HTGE HTGF | Apoptotic T-cell, | Uni-ZAP XR | LP04 |
| | re-excision | | |
| HMAJ HMAK | H Macrophage | Uni-ZAP XR | LP04 |
| | (GM-CSF treated), | | |
| | re-excision | | |
| HACB HACC HACD | Human Adipose | Uni-ZAP XR | LP04 |
| | Tissue, re-excision | | |
| HFPA | H. Frontal Cortex, | Uni-ZAP XR | LP04 |
| | Epileptic | | |
| HFAA HFAB HFAC | Alzheimers, spongy | Uni-ZAP XR | LP04 |
| HFAD HFAE | change | | |
| HFAM | Frontal Lobe, | Uni-ZAP XR | LP04 |
| | Dementia | | |
| HMIA HMIB HMIC | Human Manic | Uni-ZAP XR | LP04 |
| | Depression Tissue | | |
| HTSA HTSE HTSF | Human Thymus | pBS | LP05 |
| HTSG HTSH | | | |
| HPBA HPBB HPBC | Human Pineal Gland | pBS | LP05 |
| HPBD HPBE | | | |
| HSAA HSAB HSAC | HSA 172 Cells | pBS | LP05 |
| HSBA HSBB HSBC | HSC 172 cells | pBS | LP05 |
| HSBM | | | |
| HJAA HJAB HJAC | Jurkat T-cell G1 phase | pBS | LP05 |
| HJAD | | | |
| HJBA HJBB HJBC | Jurkat T-Cell, S phase | pBS | LP05 |
| HJBD | | | |
| HAFA HAFB | Aorta endothelial | pBS | LP05 |
| | cells + TNF-a | | |
| HAWA HAWB | Human White Adipose | pBS | LP05 |
| HAWC | | | |
| HTNA HTNB | Human Thyroid | pBS | LP05 |
| HONA | Normal Ovary, | pBS | LP05 |
| | Premenopausal | | |
| HARA HARB | Human Adult Retina | pBS | LP05 |
| HLJA HUB | Human Lung | pCMVSport 1 | LP06 |
| HOFM HOFN HOFO | H. Ovarian Tumor, II, | pCMVSport | LP07 |
| | OV5232 | 2.0 | |
| HOGA HOGB HOGC | OV 10-3-95 | pCMVSport | LP07 |
| | | 2.0 | |
| HCGL | CD34 + cells, II | pCMVSport | LP07 |
| | | 2.0 | |
| HDLA | Hodgkin's | pCMVSport | LP07 |
| | Lymphoma I | 2.0 | |
| HDTA HDTB HDTC | Hodgkin's | pCMVSport | LP07 |
| HDTD HDTE | Lymphoma II | 2.0 | |
| HKAA HKAB HKAC | Keratinocyte | pCMVSport | LP07 |
| HKAD HKAE HKAF | | 2.0 | |
| HKAG HKAH | | | |
| HCIM | CAPFINDER, Crohn's | pCMVSport | LP07 |
| | Disease, lib 2 | 2.0 | |
| HKAL | Keratinocyte, lib 2 | pCMVSport | LP07 |
| | | 2.0 | |
| HKAT | Keratinocyte, lib 3 | pCMVSport | LP07 |
| | | 2.0 | |
| HNDA | Nasal polyps | pCMVSport | LP07 |
| | | 2.0 | |
| HDRA | H. Primary Dendritic | pCMVSport | LP07 |
| | Cells, lib 3 | 2.0 | |
| HOHA HOHB HOHC | Human Osteoblasts II | pCMVSport | LP07 |
| | | 2.0 | |
| HLDA HLDB HLDC | Liver, Hepatoma | pCMVSport | LP08 |
| | | 3.0 | |
| HLDN HLDO HLDP | Human Liver, normal | pCMVSport | LP08 |
| | | 3.0 | |
| HMTA | pBMC stimulated | pCMVSport | LP08 |
| | w/poly TIC | 3.0 | |
| HNTA | NTERA2, control | pCMVSport | LP08 |
| | | 3.0 | |
| HDPA HDPB HDPC | Primary Dendritic | pCMVSport | LP08 |
| HDPD HDPF HDPG | Cells, lib 1 | 3.0 | |
| HDPH HDPI HDPJ | | | |
| HDPK | | | |
| HDPM HDPN HDPO | Primary Dendritic | pCMVSport | LP08 |
| HDPP | cells, frac 2 | 3.0 | |
| HMUA HMUB | Myoloid Progenitor | pCMVSport | LP08 |
| HMUC | Cell Line | 3.0 | |
| HHEA HHEB HHEC | T Cell helper I | pCMVSport | LP08 |
| HHED | | 3.0 | |
| HHEM HHEN HHEO | T cell helper II | pCMVSport | LP08 |
| HHEP | | 3.0 | |
| HEQA HEQB HEQC | Human endometrial | pCMVSport | LP08 |
| | stromal cells | 3.0 | |
| HJMA HJMB | Human endometrial | pCMVSport | LP08 |
| | stromal cells—treated | 3.0 | |
| | with progesterone | | |
| HSWA HSWB HSWC | Human endometrial | pCMVSport | LP08 |
| | stromal cells—treated | 3.0 | |
| | with estradiol | | |
| HSYA HSYB HSYC | Human Thymus | pCMVSport | LP08 |
| | Stromal Cells | 3.0 | |
| HLWA HLWB | Human Placenta | pCMVSport | LP08 |
| HLWC | | 3.0 | |
| HRAA HRAB HRAC | Rejected Kidney, lib 4 | pCMVSport | LP08 |
| | | 3.0 | |
| HMTM | PCR, pBMC TIC | PCRII | LP09 |
| | treated | | |
| HMJA | H. Meniingima, M6 | pSport 1 | LP10 |
| HMKA HMKB | H. Meningima, M1 | pSport 1 | LP10 |
| HMKC HMKD | | | |
| HMKE | | | |
| HUSG HUSI | Human umbilical vein | pSport 1 | LP10 |
| | endothelial cells, IL-4 | | |
| | induced | | |
| HUSX HUSY | Human Umbilical | pSport 1 | LP10 |
| | Vein Endothelial | | |
| | Cells, uninduced | | |
| HOFA | Ovarian Tumor I, | pSport 1 | LP10 |
| | OV5232 | | |
| HCFA HCFB HCFC | T-Cell PHA 16 hrs | pSport 1 | LP10 |
| HCFD | | | |
| HCFL HCFM HCFN | T-Cell PHA 24 hrs | pSport 1 | LP10 |
| HCFO | | | |
| HADA HADC HADD | Human Adipose | pSport 1 | LP10 |
| HADE HADF HADG | | | |
| HOVA HOVB HOVC | Human Ovary | pSport 1 | LP10 |
| HTWB HTWC | Resting T-Cell | pSport 1 | LP10 |
| HTWD HTWE HTWF | Library, II | | |
| HMMA | Spleen metastic | pSport 1 | LP10 |
| | melanoma | | |
| HLYA HLYB HLYC | Spleen, Chronic | pSport 1 | LP10 |
| HLYD HLYE | lymphocytic leukemia | | |
| HCGA | CD34+ cell, I | pSport 1 | LP10 |
| HEOM HEON | Human Eosinophils | pSport 1 | LP10 |
| HTDA | Human Tonsil, Lib 3 | pSport 1 | LP10 |
| HSPA | Salivary Gland, Lib 2 | pSport 1 | LP10 |
| HCHA HCHB HCHC | Breast Cancer cell | pSport 1 | LP10 |
| | line, MDA 36 | | |
| HCHM HCHN | Breast Cancer Cell | pSport 1 | LP10 |
| | line, angiogenic | | |
| HCIA | Crohn's Disease | pSport 1 | LP10 |
| HDAA HDAB HDAC | HEL cell line | pSport 1 | LP10 |
| HABA | Human Astrocyte | pSport 1 | LP10 |
| HUFA HUFB HUFC | Ulcerative Colitis | pSport 1 | LP10 |
| HNTM | NTERA2 + retinoic | pSport 1 | LP10 |
| | acid, 14 days | | |
| HDQA | Primary Dendntic | pSport 1 | LP10 |
| | cells, CapFinder2, | | |
| | frac I | | |
| HDQM | Primary Dendritic | pSport 1 | LP10 |
| | Cells, CapFinder, | | |
| | frac 2 | | |
| HLDX | Human Liver, normal, | pSport 1 | LP10 |
| HULA HULB HULC | Human Dermal | pSport1 | LP10 |
| | Endothelial Cells, | | |
| | untreated | | |
| HUMA | Human Dermal | pSport1 | LP10 |
| | Endothelial | | |
| | cells, treated | | |
| HCJA | Human Stromal | pSport1 | LP10 |
| | Endometrial fibro- | | |
| | blasts, untreated | | |
| HCJM | Human Stromal | pSport1 | LP10 |
| | endometrial fibro- | | |
| | blasts, treated | | |
| | w/estradiol | | |
| HEDA | Human Stromal | pSport1 | LP10 |
| | endometrial fibro- | | |
| | blasts, treated with | | |
| | progesterone | | |
| HFNA | Human ovary tumor | pSport1 | LP10 |
| | cell OV350721 | | |
| HKGA HKGB HKGC | Merkel Cells | pSport1 | LP10 |
| HKGD | | | |
| HISA HISB HISC | Pancreas Islet Cell | pSport1 | LP10 |
| | Tumor | | |
| HLSA | Skin, burned | pSport1 | LP10 |
| HBZA | Prostate,BPH, Lib 2 | pSport 1 | LP10 |
| HBZS | Prostate BPH, Lib 2, | pSport 1 | LP10 |
| | subtracted | | |
| HFIA HFIB HFIC | Synovial Fibroblasts | pSport 1 | LP10 |
| | (control) | | |
| HFIH HFII HFIJ | Synovial hypoxia | pSport 1 | LP10 |
| HFIT HFIU HFIV | Synovial IL-1/TNF | pSport 1 | LP10 |
| | stimulated | | |
| HGCA | Messangial cell, | pSport1 | LP10 |
| | frac 1 | | |
| HMVA HMVB | Bone Marrow Stromal | pSport1 | LP10 |
| HMVC | Cell, untreated | | |
| HFIX HFIY HFIZ | Synovial Fibroblasts | pSport1 | LP10 |
| | (I11/TNF), subt | | |
| HFOX HFOY HFOZ | Synovial hypoxia— | pSport1 | LP10 |
| | RSF subtracted | | |
| HMQA HMQB | Human Activated | Uni-ZAP XR | LP11 |
| HMQC HMQD | Monocytes | | |
| HLIA HLIB HLIC | Human Liver | pCMVSport 1 | LP012 |
| HHBA HHBB HHBC | Human Heart | pCMVSport 1 | LP012 |
| HHBD HHBE | | | |
| HBBA HBBB | Human Brain | pCMVSport 1 | LP012 |
| HLJA HLJB HLJC | Human Lung | pCMVSport 1 | LP012 |
| HLJD HLJE | | | |
| HOGA HOGB HOGC | Ovarian Tumor | pCMVSport | LP012 |
| | | 2.0 | |
| HTJM | Human Tonsils, Lib 2 | pCMVSport | LP012 |
| | | 2.0 | |
| HAMF HAMG | KMH2 | pCMVSport | LP012 |
| | | 3.0 | |
| HAJA HAJB HMC | L428 | pCMVSport | LP012 |
| | | 3.0 | |
| HWBA HWBB | Dendritic cells, | pCMVSport | LP012 |
| HWBC HWBD | pooled | 3.0 | |
| HWBE | | | |
| HWAA HWAB | Human Bone Marrow, | pCMVSport | LP012 |
| HWAC HWAD | treated | 3.0 | |
| HWAE | | | |
| HYAA HYAB HYAC | B Cell lymphoma | pCMVSport | LP012 |
| | | 3.0 | |
| HWHG HWHH | Healing groin wound, | pCMVSport | LP012 |
| HWHI | 6.5 hours post incision | 3.0 | |
| HWHP HWHQ | Healing groin wound; | pCMVSport | LP012 |
| HWHR | 7.5 hours post incision | 3.0 | |
| HARM | Healing groin | pCMVSport | LP012 |
| | wound—zero hr post- | 3.0 | |
| | incision (control) | | |
| HBIM | Olfactory epithelium; | pCMVSport | LP012 |
| | nasalcavity | 3.0 | |
| HWDA | Healing Abdomen | pCMVSport | LP012 |
| | wound; 70 & 90 min | 3.0 | |
| | post incision | | |
| HWEA | Healing Abdomen | pCMVSport | LP012 |
| | Wound; 15 days post | 3.0 | |
| | incision | | |
| HWJA | Healing Abdomen | pCMVSport | LP012 |
| | Wound; 21 & 29 days | 3.0 | |
| HNAL | Human Tongue, frac 2 | pSport1 | LP012 |
| HMJA | H. Meniingima, M6 | pSport1 | LP012 |
| HMKA HMKB | H. Meningima, M1 | pSport1 | LP012 |
| HMKC HMKD | | | |
| HMKE | | | |
| HOFA | Ovarian Tumor I, | pSport1 | LP012 |
| | OV5232 | | |
| HCFA HCFB HCFC | T-Cell PHA 16 hrs | pSport1 | LP012 |
| HCFD | | | |
| HCFL HCFM HCFN | T-Cell PHA 24 hrs | pSport1 | LP012 |
| HCFO | | | |
| HMMA HMMB | Spleen metastic | pSport1 | LP012 |
| HMMC | melanoma | | |
| HTDA | Human Tonsil, Lib 3 | pSport1 | LP012 |
| HDBA | Human Fetal Thymus | pSport1 | LP012 |
| HDUA | Pericardium | pSport1 | LP012 |
| HBZA | Prostate,BPH, Lib 2 | pSport1 | LP012 |
| HWCA | Larynx tumor | pSport1 | LP012 |
| HWKA | Normal lung | pSport1 | LP012 |
| HSMB | Bone marrow stroma, | pSport1 | LP012 |
| | treated | | |
| HBHM | Normal trachea | pSport1 | LP012 |
| HLFC | Human Larynx | pSport1 | LP012 |
| HLRB | Siebben Polyposis | pSport1 | LP012 |
| HNIA | Mammary Gland | pSport1 | LPOl2 |
| HNJB | Palate carcinoma | pSport1 | LP012 |
| HNKA | Palate normal | pSport1 | LP012 |
| HMZA | Pharynx carcinoma | pSport1 | LP012 |
| HABO | Cheek Carcinoma | pSport1 | LP012 |
| HMZM | Pharynx Carcinoma | pSport1 | LP012 |
| HDRM | Larynx Carcinoma | pSport1 | LP012 |
| HVAA | Pancreas normal | pSport1 | LP012 |
| | PCA4 No | | |
| HICA | Tongue carcinoma | pSport1 | LP012 |
| HUKA HUKB HUKC | Human Uterine Cancer | Lambda ZAP II | LP013 |
| HUKD HUKE | | | |
| HFFA | Human Fetal Brain, | Lambda ZAP II | LP013 |
| | random primed | | |
| HTUA | Activated T-cell | Lambda ZAP II | LP013 |
| | labeled with 4-thioluri | | |
| HBQA | Early Stage Human | Lambda ZAP II | LP013 |
| | Brain, random primed | | |
| HMEB | Human microvascular | Lambda ZAP II | LP013 |
| | Endothelial cells, | | |
| | fract. B | | |
| HUSH | Human Umbilical | Lambda ZAP II | LP013 |
| | Vein Endothelial cells, | | |
| | fract. A, re-excision | | |
| HLQC HLQD | Hepatocellular tumor, | Lambda ZAP II | LP013 |
| | re-excision | | |
| HTWJ HTWK HTWL | Resting T-cell, | Lambda ZAP II | LP013 |
| | re-excision | | |
| HF6S | Human Whole 6 week | pBluescript | LP013 |
| | Old Embryo (II), subt | | |
| HHPS | Human Hippocampus, | pBluescript | LP013 |
| | subtracted | | |
| HL1S | LNCAP, differential | pBluescript | LP013 |
| | expression | | |
| HLHS HLHT | Early Stage Human | pBluescnpt | LP013 |
| | Lung, Subtracted | | |
| HSUS | Supt cells, cyclo- | pBluescript | LP013 |
| | hexamide treated, | | |
| | subtracted | | |
| HSUT | Supt cells, cyclo- | pBluescript | LP013 |
| | hexamide treated, | | |
| | differentially | | |
| | expressed | | |
| HSDS | H. Striatum | pBluescript | LP013 |
| | Depression, subtracted | | |
| HPTZ | Human Pituitary, | pBluescript | LP013 |
| | Subtracted VII | | |
| HSDX | H. Striatum | pBluescript | LP013 |
| | Depression, subt II | | |
| HSDZ | H. Striatum | pBluescript | LP013 |
| | Depression, subt | | |
| HPBA HPBB HPBC | Human Pineal Gland | pBluescript | LP013 |
| HPBD HPBE | | SK- | |
| HRTA | Colorectal Tumor | pBluescript | LP013 |
| | | SK- | |
| HSBA HSBB HSBC | HSC172 cells | pBluescript | LP013 |
| HSBM | | SK- | |
| HJAA HJAB HJAC | Jurkat T-cell G1 phase | pBluescript | LP013 |
| HJAD | | SK- | |
| HJBA HJBB HJBC | Jurkat T-cell, S1 phase | pBluescript | LP013 |
| HJBD | | SK- | |
| HTNA HTNB | Human Thyroid | pBluescript | LP013 |
| | | SK- | |
| HAHA HAJB | Human Adult Heart | Uni-ZAP XR | LP013 |
| HE6A | Whole 6 week Old | Uni-ZAP XR | LP013 |
| | Embryo | | |
| HFCA HFCB HFCC | Human Fetal Brain | Uni-ZAP XR | LP013 |
| HFCD HFCE | | | |
| HFKC HFKD HFKE | Human Fetal Kidney | Uni-ZAP XR | LP013 |
| HFKF HFKG | | | |
| HGBA HGBD HGBE | Human Gall Bladder | Uni-ZAP XR | LP013 |
| HGBF | | | |
| HPRA HPRB HPRC | Human Prostate | Uni-ZAP XR | LP013 |
| HPRD | | | |
| HTEA HTEB HTEC | Human Testes | Uni-ZAP XR | LP013 |
| HTED HTEE | | | |
| HTTA HTTB HTTC | Human Testes Tumor | Uni-ZAP XR | LP013 |
| HTTD HTTE | | | |
| HYBA HYBB | Human Fetal Bone | Uni-ZAP XR | LP013 |
| HFLA | Human Fetal Liver | Uni-ZAP XR | LP013 |
| HHFB HHFC HHFD | Human Fetal Heart | Uni-ZAP XR | LP013 |
| HHFE HHFF | | | |
| HUVB HUVC HUVD | Human Umbilical | Uni-ZAP XR | LP013 |
| HUVE | Vein, End. remake | | |
| HTHB HTHC HTHD | Human Thymus | Uni-ZAP XR | LP013 |
| HSTA HSTB HSTC | Human Skin Tumor | Uni-ZAP XR | LP013 |
| HSTD | | | |
| HTAA HTAB HTAC | Human Activated | Uni-ZAP XR | LP013 |
| HTAD HTAE | T-cells | | |
| HFEA HFEB HFEC | Human Fetal | Uni-ZAP XR | LP013 |
| | Epithelium (skin) | | |
| HJPA HJPB HJPC | Human Jurkat | Uni-ZAP XR | LP013 |
| HJPD | Membrane Bound | | |
| | Polysomes | | |
| HESA | Human Epithelioid | Uni-ZAP XR | LP013 |
| | Sarcoma | | |
| HALS | Human Adult Liver, | Uni-ZAP XR | LP013 |
| | Subtracted | | |
| HFTA HFTB HFTC | Human Fetal Dura | Uni-ZAP XR | LP013 |
| HFTD | Mater | | |
| HCAA UCAB HCAC | Cem cells, cyclo- | Uni-ZAP XR | LP013 |
| | hexamide treated | | |
| HRGA HRGB HRGC | Raji Cells, cyclo- | Uni-ZAP XR | LP013 |
| HRGD | hexamide treated | | |
| HE9A HE9B HE9C | Nine Week Old Early | Uni-ZAP XR | LP013 |
| HE9D HE9E | Stage Human | | |
| HSFA | Human Fibrosarcoma | Uni-ZAP XR | LP013 |
| HATA HATB HATC | Human Adrenal Gland | Uni-ZAP XR | LP013 |
| HATD HATE | Tumor | | |
| HTRA | Human Trachea | Uni-ZAP XR | LP013 |
| | Tumor | | |
| HE2A HE2D HE2E | 12 Week Old Early | Uni-ZAP XR | LP013 |
| HE2H HE2I | Stage Human | | |
| HE2B HE2C HE2F | 12 Week Old Early | Uni-ZAP XR | LP013 |
| HE2G HE2P | Stage Human, II | | |
| HNEA HNEB HNEC | Human Neutrophil | Uni-ZAP XR | LP013 |
| HNED HNEE | | | |
| HBGA | Human Primary Breast | Uni-ZAP XR | LP013 |
| | Cancer | | |
| HPTS HPTT HPTU | Human Pituitary, | Uni-ZAP XR | LP013 |
| | subtracted | | |
| HMQA HMQB | Human Activated | Uni-ZAP XR | LP013 |
| HMQC HMQD | Monocytes | | |
| HOAA HOAB HOAC | Human Osteosarcoma | Uni-ZAP XR | LP013 |
| HTOA HTOD HTOE | human tonsils | Uni-ZAP XR | LP013 |
| HTOF HTOG | | | |
| HMGB | Human OB MG63 | Uni-ZAP XR | LP013 |
| | control fraction I | | |
| HOPB | Human OB HOS | Uni-ZAP XR | LP013 |
| | control fraction I | | |
| HOQB | Human OB HOS | Uni-ZAP XR | LP013 |
| | treated (1 nM E2) | | |
| | fraction I | | |
| HAUA HAUB HAUC | Amniotic Cells— | Uni-ZAP XR | LP013 |
| | TNF induced | | |
| HAQA HAQB HAQC | Amniotic Cells— | Uni-ZAP XR | LP013 |
| HAQD | Primary Culture | | |
| HROA HROC | HUMAN STOMACH | Uni-ZAP XR | LP013 |
| HBJA HBJB HBJC | HUMAN B CELL | Uni-ZAP XR | LP013 |
| HBJD HBJE | LYMPHOMA | | |
| HODA HODB HODC | human ovarian cancer | Uni-ZAP XR | LP013 |
| HODD | | | |
| HCPA | Corpus Callosum | Uni-ZAP XR | LP013 |
| HSOA | stomach cancer | Uni-ZAP XR | LP013 |
| | (human) | | |
| HERA | SKIN | Uni-ZAP XR | LP013 |
| HMDA | Brain- | Uni-ZAP XR | LP013 |
| | medulloblastoma | | |
| HGLA HGLB HGLD | Glioblastoma | Uni-ZAP XR | LP013 |
| HWTA HWTB | wilm's tumor | Uni-ZAP XR | LP013 |
| HWTC | | | |
| HEAA | H. Atrophic | Uni-ZAP XR | LP013 |
| | Endometrium | | |
| HAPN HAPO HAPP | Human Adult | Uni-ZAP XR | LP013 |
| HAPQ HAPR | Pulmonary; re-excision | | |
| HLTG HLTH | Human T-cell | Uni-ZAP XR | LP013 |
| | lymphoma; re-excision | | |
| HAHC HAHD HAHE | Human Adult Heart; | Uni-ZAP XR | LP013 |
| | re-excision | | |
| HAGA HAGB HAGC | Human Amygdala | Uni-ZAP XR | LP013 |
| HAGD | | | |
| HSJA HSJB HSJC | Smooth muscle-ILb | Uni-ZAP XR | LP013 |
| | induced | | |
| HSHA HSHB HSHC | Smooth muscle, ILIb | Uni-ZAP XR | LP013 |
| | induced | | |
| HPWA HPWB HPWC | Prostate BPH | Uni-ZAP XR | LP013 |
| HPWD HPWE | | | |
| HPIA HPIB HPIC | LNCAP prostate cell | Uni-ZAP XR | LP013 |
| | line | | |
| HPJA HPJB HPJC | PC3 Prostate cell line | Uni-ZAP XR | LP013 |
| HBTA | Bone Marrow Stroma, | Uni-ZAP XR | LP013 |
| | TNF & LPS ind | | |
| HMCF HMCG HMCH | Macrophage-oxLDL; | Uni-ZAP XR | LP013 |
| HMCI HMCJ | re-excision | | |
| HAGG HAGH HAGI | Human Amygdala; | Uni-ZAP XR | LP013 |
| | re-excision | | |
| HACA | H. Adipose Tissue | Uni-ZAP XR | LP013 |
| HKFB | K562 + PMA (36 hrs), | ZAP Express | LP013 |
| | re-excision | | |
| HCWT HCWU | CD34 positive cells | ZAP Express | LP013 |
| HCWV | (cord blood), re-ex | | |
| HBWA | Whole brain | ZAP Express | LP013 |
| HBXA HBXB HBXC | Human Whole Brain | ZAP Express | LP013 |
| HBXD | #2—Oligo dT > | | |
| | 1.5 Kb | | |
| HAVM | Temporal cortex— | pT-Adv | LP014 |
| | Alzheizmer | | |
| HAVT | Hippocampus, | pT-Adv | LP014 |
| | Alzheimer Subtracted | | |
| HHAS | CHME Cell Line | Uni-ZAP XR | LP014 |
| HAJR | Larynx normal | pSport 1 | LP014 |
| HWLE HWLF HWLG | Colon Normal | pSport 1 | LP014 |
| HWLH | | | |
| HCRM HCRN HCRO | Colon Carcinoma | pSport 1 | LP014 |
| HWLI HWLJ HWLK | Colon Normal | pSport 1 | LP014 |
| HWLQ HWLR HWLS | Colon Tumor | pSport 1 | LP014 |
| HWLT | | | |
| HBFM | Gastrocoemius Muscle | pSport 1 | LP014 |
| HBOD HBOE | Quadriceps Muscle | pSport 1 | LP014 |
| HBKD HBKE | Soleus Muscle | pSport 1 | LP014 |
| HCCM | Pancreatic Langerhans | pSport 1 | LP014 |
| HWGA | Larynx carcinoma | pSport 1 | LP014 |
| HWGM HWGN | Larynx carcinoma | pSport 1 | LP014 |
| HWLA HWLB | Normal colon | pSport 1 | LP014 |
| HWLC | | | |
| HWLM HWLN | Colon Tumor | pSport 1 | LP014 |
| HVAM HVAN HVAO | Pancreas Tumor | pSport 1 | LP014 |
| HWGQ | Larynx carcinoma | pSport 1 | LP014 |
| HAQM HAQN | Salivary Gland | pSport 1 | LP014 |
| HASM | Stomach; normal | pSport 1 | LP014 |
| HBCM | Uterus; normal | pSport 1 | LP014 |
| HCDM | Testis; normal | pSport 1 | LP014 |
| HDJM | Brain; normal | pSport 1 | LP014 |
| HEFM | Adrenal Gland, normal | pSport 1 | LP014 |
| HBAA | Rectum normal | pSport 1 | LP014 |
| HFDM | Rectum tumour | pSport 1 | LP014 |
| HGAM | Colon, normal | pSport 1 | LP014 |
| HHMM | Colon, tumour | pSport 1 | LP014 |
| HCLB HCLC | Human Lung Cancer | Lambda Zap II | LP015 |
| HRLA | L1 Cell line | ZAP Express | LP015 |
| HHAM | Hypothalamus, | pCMVSport | LP015 |
| | Alzheimers | 3.0 | |
| HKBA | Ku 812F Basophils | pSport 1 | LP015 |
| | Line | | |
| HS2S | Saos2, | pSport 1 | LP016 |
| | Dexamethosome | | |
| | Treated | | |
| HA5A | Lung Carcinoma A549 | pSport 1 | LP016 |
| | TNFalpha activated | | |
| HTFM | TF-1 Cell Line | pSport 1 | LP016 |
| | GM-CSF Treated | | |
| HYAS | Thyroid Tumour | pSport 1 | LP016 |
| HUTS | Larynx Normal | pSport 1 | LP016 |
| HXOA | Larynx Tumor | pSport 1 | LP016 |
| HEAH | Ea.hy.926 cell line | pSport 1 | LP016 |
| HINA | Adenocarcinoma | pSport 1 | LP016 |
| | Human | | |
| HRMA | Lung Mesothelium | pSport 1 | LP016 |
| HLCL | Human Pre- | Uni-Zap XR | LP017 |
| | Differentiated | | |
| | Adipocytes | | |
| HS2A | Saos2 Cells | pSport 1 | LP020 |
| HS2I | Saos2 Cells; Vitamin | pSport 1 | LP020 |
| | D3 Treated | | |
| HUCM | CHME Cell Line, | pSport 1 | LP020 |
| | untreated | | |
| HEPN | Aryepiglottis Normal | pSport 1 | LP020 |
| HPSN | Sinus Piniformis | pSport 1 | LP020 |
| | Tumour | | |
| HNSA | Stomach Normal | pSport 1 | LP020 |
| HNSM | Stomach Tumour | pSport 1 | LP020 |
| HNLA | Liver Normal Met5No | pSport 1 | LP020 |
| HUTA | Liver Tumour Met | pSport 1 | LP020 |
| | 5 Tu | | |
| HOCN | Colon Normal | pSport 1 | LP020 |
| HOCT | Colon Tumor | pSport 1 | LP020 |
| HTNT | Tongue Tumour | pSport 1 | LP020 |
| HLXN | Larynx Normal | pSport 1 | LP020 |
| HLXT | Larynx Tumour | pSport 1 | LP020 |
| HTYN | Thymus | pSport 1 | LP020 |
| HPLN | Placenta | pSport 1 | LP020 |
| HTNG | Tongue Normal | pSport 1 | LP020 |
| HZAA | Thyroid Normal | pSport 1 | LP020 |
| | (SDCA2 No) | | |
| HWES | Thyroid Thyroiditis | pSport 1 | LP020 |
| HFHD | Ficolled Human | pTrip1Ex2 | LP021 |
| | Stromal Cells, 5Fu | | |
| | treated | | |
| HFHM, HFHN | Ficolled Human | pTrip1Ex2 | LP021 |
| | Stromal Cells, | | |
| | Untreated | | |
| HPCI | Hep G2 Cells, lambda | lambda | LP021 |
| | library | Zap-CMV XR | |
| HBCA, HBCB, HBCC | H. Lymph node breast | Uni-ZAP XR | LP021 |
| | Cancer | | |
| HCOK | Chondrocytes | pSPORT1 | LP022 |
| HDCA, HDCB, | Dendritic Cells From | pSPORT1 | LP022 |
| HDCC | CD34 Cells | | |
| HDMA, HDMB | CD40 activated | pSPORT1 | LP022 |
| | monocyte dendritic | | |
| | cells | | |
| HDDM, HDDN, | LPS activated derived | pSPORT1 | LP022 |
| HDDO | dendritic cells | | |
| HPCR | Hep G2 Cells, PCR | lambda | LP022 |
| | library | Zap-CMV XR | |
| HAAA, HAAB, | Lung, Cancer | pSPORT1 | LP022 |
| HAAC | (4005313A3): Invasive | | |
| | Poorly Differentiated | | |
| | Lung Adenocarcinoma | | |
| HIPA, HIPB, HIPC | Lung, Cancer | pSPORT1 | LP022 |
| | (4005163 B7): | | |
| | Invasive, Poorly Diff. | | |
| | Adenocarcinoma, | | |
| | Metastatic | | |
| HOOH, HOOI | Ovary, Cancer: | pSPORT1 | LP022 |
| | (4004562 B6) | | |
| | Papillary Serous | | |
| | Cystic Neoplasm, Low | | |
| Malignant Pot | | | |
| HIDA | Lung, Normal: | pSPORT1 | LP022 |
| | (4005313 BL) | | |
| HUJA, HUJB, HUJC, | B-Cells | pCMVSport | LP022 |
| HUJD, HUJE | | 3.0 | |
| HNOA, HNOB, | Ovary, Normal: | pSPORT1 | LP022 |
| HNOC, HNOD | (9805C040R) | | |
| HNLM | Lung, Normal: | pSPORT1 | LP022 |
| | (4005313 B1) | | |
| HSCL | Stromal Cells | pSPORT1 | LP022 |
| HAAX | Lung, Cancer: | pSPORT1 | LP022 |
| | (4005313 A3) Invasive | | |
| | Poorly-differentiated | | |
| | Metastatic lung | | |
| | adenocarcinoma | | |
| HUUA, HUUB, | B-cells (unstimulated) | pTrip1Ex2 | LP022 |
| HUUC, HUUD | | | |
| HWWA, HWWB, | B-cells (stimulated) | pSPORT1 | LP022 |
| HWWC, HWWD, | | | |
| HWWE, HWWF, | | | |
| HWWG | | | |
| HCCC | Colon, Cancer: | pCMVSport | LP023 |
| | (9808C064R) | 3.0 | |
| HPDO HPDP HPDQ | Ovary, Cancer | pSport 1 | LP023 |
| HPDR HPD | (9809C332): Poorly | | |
| | differentiated | | |
| | adenocarcinoma | | |
| HPCO HPCP HPCQ | Ovary, Cancer | pSport 1 | LP023 |
| HPCT | (15395A1F): Grade II | | |
| | Papillary Carcinoma | | |
| HOCM HOCO HOCP | Ovary, Cancer: | pSport 1 | LP023 |
| HOCQ | (15799A1F) Poorly | | |
| | differentiated | | |
| | carcinoma | | |
| HCBM HCBN HCBO | Breast, Cancer: | pSport 1 | LP023 |
| | (4004943 A5) | | |
| HNBT HNBU HNBV | Breast, Normal: | pSport 1 | LP023 |
| | (4005522B2) | | |
| HBCP HBCQ | Breast, Cancer: | pSport 1 | LP023 |
| | (4005522 A2) | | |
| HBCJ | Breast, Cancer: | pSport 1 | LP023 |
| | (9806C012R) | | |
| HSAM HSAN | Stromal cells 3.88 | pSport 1 | LP023 |
| HVCA HVCB HVCC | Ovary, Cancer: | pSport 1 | LP023 |
| HVCD | (4004332 A2) | | |
| HSCK HSEN HSEO | Stromal cells | pSport 1 | LP023 |
| | (HBM3.18) | | |
| HSCP HSCQ | stromal cell clone 2.5 | pSport 1 | LP023 |
| HUXA | Breast Cancer: | pSport 1 | LP023 |
| | (4005385 A2) | | |
| HCOM HCON HCOO | Ovary, Cancer | pSport 1 | LP023 |
| HCOP HCOQ | (4004650 A3): Well- | | |
| | Differentiated Micro- | | |
| | papillary Serous | | |
| | Carcinoma | | |
| HBNM | Breast, Cancer: | pSport 1 | LP023 |
| | (9802C020E) | | |
| HVVA HVVB HVVC | Human Bone Marrow, | pSport 1 | LP023 |
| HVVD HVVE | treated | | |

[0918] Two nonlimiting examples are provided below for isolating a particular clone from the deposited sample of plasmid cDNAs cited for that clone in Table 7. First, a plasmid is directly isolated by screening the clones using a polynucleotide probe corresponding to the nucleotide sequence of SEQ ID NO:X.

[0919] Particularly, a specific polynucleotide with 30-40 nucleotides is synthesized using an Applied Biosystems DNA synthesizer according to the sequence reported. The oligonucleotide is labeled, for instance, with ³²P-γ-ATP using T4 polynucleotide kinase and purified according to routine methods. (E.g., Maniatis et al., Molecular Cloning: A Laboratory Manual, Cold Spring Harbor Press, Cold Spring, N.Y. (1982).) The plasmid mixture is transformed into a suitable host, as indicated above (such as XL-1 Blue (Stratagene)) using techniques known to those of skill in the art, such as those provided by the vector supplier or in related publications or patents cited above. The transformants are plated on 1.5% agar plates (containing the appropriate selection agent, e.g., ampicillin) to a density of about 150 transformants (colonies) per plate. These plates are screened using Nylon membranes according to routine methods for bacterial colony screening (e.g., Sambrook et al., Molecular Cloning: A Laboratory Manual, 2nd Edit., (1989), Cold Spring Harbor Laboratory Press, pages 1.93 to 1.104), or other techniques known to those of skill in the art.

[0920] Alternatively, two primers of 17-20 nucleotides derived from both ends of the nucleotide sequence of SEQ ID NO:X are synthesized and used to amplify the desired cDNA using the deposited cDNA plasmid as a template. The polymerase chain reaction is carried out under routine conditions, for instance, in 25 μl of reaction mixture with 0.5 ug of the above cDNA template. A convenient reaction mixture is 1.5-5 mM MgCl₂, 0.01% (w/v) gelatin, 20 μM each of dATP, dCTP, dGTP, dTTP, 25 pmol of each primer and 0.25 Unit of Taq polymerase. Thirty five cycles of PCR (denaturation at 94° C. for 1 min; annealing at 55° C. for 1 min; elongation at 72° C. for 1 min) are performed with a Perkin-Elmer Cetus automated thermal cycler. The amplified product is analyzed by agarose gel electrophoresis and the DNA band with expected molecular weight is excised and purified. The PCR product is verified to be the selected sequence by subcloning and sequencing the DNA product.

[0921] Several methods are available for the identification of the 5′ or 3′ non-coding portions of a gene which may not be present in the deposited clone. These methods include but are not limited to, filter probing, clone enrichment using specific probes, and protocols similar or identical to 5′ and 3′ “RACE” protocols which are well known in the art. For instance, a method similar to 5′ RACE is available for generating the missing 5′ end of a desired full-length transcript. (Fromont-Racine et al., Nucleic Acids Res. 21(7):1683-1684 (1993).)

[0922] Briefly, a specific RNA oligonucleotide is ligated to the 5′ ends of a population of RNA presumably containing full-length gene RNA transcripts. A primer set containing a primer specific to the ligated RNA oligonucleotide and a primer specific to a known sequence of the gene of interest is used to PCR amplify the 5′ portion of the desired full-length gene. This amplified product may then be sequenced and used to generate the full length gene.

[0923] This above method starts with total RNA isolated from the desired source, although poly-A+ RNA can be used. The RNA preparation can then be treated with phosphatase if necessary to eliminate 5′ phosphate groups on degraded or damaged RNA which may interfere with the later RNA ligase step. The phosphatase should then be inactivated and the RNA treated with tobacco acid pyrophosphatase in order to remove the cap structure present at the 5′ ends of messenger RNAs. This reaction leaves a 5′ phosphate group at the 5′ end of the cap cleaved RNA which can then be ligated to an RNA oligonucleotide using T4 RNA ligase.

[0924] This modified RNA preparation is used as a template for first strand cDNA synthesis using a gene specific oligonucleotide. The first strand synthesis reaction is used as a template for PCR amplification of the desired 5′ end using a primer specific to the ligated RNA oligonucleotide and a primer specific to the known sequence of the gene of interest. The resultant product is then sequenced and analyzed to confirm that the 5′ end sequence belongs to the desired gene.

### Example 2

### Isolation of Genomic Clones Corresponding to a Polynucleotide

[0925] A human genomic P1 library (Genomic Systems, Inc.) is screened by PCR using primers selected for the sequence corresponding to SEQ ID NO:X according to the method described in Example 1. (See also, Sambrook et al., Molecular Cloning: A Laboratory Manual, 2nd Edn., (1989), Cold Spring Harbor Laboratory Press).

### Example 3

### Tissue Specific Expression Analysis

[0926] The Human Genome Sciences, Inc. (HGS) database is derived from sequencing tissue and/or disease specific cDNA libraries. Libraries generated from a particular tissue are selected and the specific tissue expression pattern of EST groups or assembled contigs within these libraries is determined by comparison of the expression patterns of those groups or contigs within the entire database. ESTs and assembled contigs which show tissue specific expression are selected.

[0927] The original clone from which the specific EST sequence was generated, or in the case of an assembled contig, the clone from which the 5′ most EST sequence was generated, is obtained from the catalogued library of clones and the insert amplified by PCR using methods known in the art. The PCR product is denatured and then transferred in 96 or 384 well format to a nylon membrane (Schleicher and Scheull) generating an array filter of tissue specific clones. Housekeeping genes, maize genes, and known tissue specific genes are included on the filters. These targets can be used in signal normalization and to validate assay sensitivity. Additional targets are included to monitor probe length and specificity of hybridization.

[0928] Radioactively labeled hybridization probes are generated by first strand cDNA synthesis per the manufacturer's instructions (Life Technologies) from mRNA/RNA samples prepared from the specific tissue being analyzed (e.g., ovarian, ovarian cancer, breast, breast cancer etc.). The hybridization probes are purified by gel exclusion chromatography, quantitated, and hybridized with the array filters in hybridization bottles at 65° C. overnight. The filters are washed under stringent conditions and signals are captured using a Fuji phosphorimager.

[0929] Data is extracted using AIS software and following background subtraction, signal normalization is performed. This includes a normalization of filter-wide expression levels between different experimental runs. Genes that are differentially expressed in the tissue of interest are identified.

### Example 4

### Chromosomal Mapping of the Polynucleotides

[0930] An oligonucleotide primer set is designed according to the sequence at the 5′ end of SEQ ID NO:X. This primer preferably spans about 100 nucleotides. This primer set is then used in a polymerase chain reaction under the following set of conditions: 30 seconds, 95° C.; 1 minute, 56° C.; 1 minute, 70° C. This cycle is repeated 32 times followed by one 5 minute cycle at 70° C. Human, mouse, and hamster DNA is used as template in addition to a somatic cell hybrid panel containing individual chromosomes or chromosome fragments (Bios, Inc). The reactions are analyzed on either 8% polyacrylamide gels or 3.5% agarose gels. Chromosome mapping is determined by the presence of an approximately 100 bp PCR fragment in the particular somatic cell hybrid.

### Example 5

### Bacterial Expression of a Polypeptide

[0931] A polynucleotide encoding a polypeptide of the present invention is amplified using PCR oligonucleotide primers corresponding to the 5′ and 3′ ends of the DNA sequence, as outlined in Example 1, to synthesize insertion fragments. The primers used to amplify the cDNA insert should preferably contain restriction sites, such as BamHI and XbaI, at the 5′ end of the primers in order to clone the amplified product into the expression vector. For example, BamHI and XbaI correspond to the restriction enzyme sites on the bacterial expression vector pQE-9. (Qiagen, Inc., Chatsworth, Calif.). This plasmid vector encodes antibiotic resistance (Amp^{r}), a bacterial origin of replication (ori), an IPTG-regulatable promoter/operator (P/O), a ribosome binding site (RBS), a 6-histidine tag (6-His), and restriction enzyme cloning sites.

[0932] The pQE-9 vector is digested with BamHI and XbaI and the amplified fragment is ligated into the pQE-9 vector maintaining the reading frame initiated at the bacterial RBS. The ligation mixture is then used to transform the E. coli strain M15/rep4 (Qiagen, Inc.) which contains multiple copies of the plasmid pREP4, which expresses the lacI repressor and also confers kanamycin resistance (Kan^{r}). Transformants are identified by their ability to grow on LB plates and ampicillin/kanamycin resistant colonies are selected. Plasmid DNA is isolated and confirmed by restriction analysis.

[0933] Clones containing the desired constructs are grown overnight (O/N) in liquid culture in LB media supplemented with both Amp (100 ug/ml) and Kan (25 ug/ml). The O/N culture is used to inoculate a large culture at a ratio of 1:100 to 1:250. The cells are grown to an optical density 600 (O.D. ⁶⁰⁰) of between 0.4 and 0.6. IPTG (Isopropyl-B-D-thiogalacto pyranoside) is then added to a final concentration of 1 mM. IPTG induces by inactivating the lacI repressor, clearing the P/O leading to increased gene expression.

[0934] Cells are grown for an extra 3 to 4 hours. Cells are then harvested by centrifugation (20 mins at 6000× g). The cell pellet is solubilized in the chaotropic agent 6 Molar Guanidine HCl by stirring for 3-4 hours at 4° C. The cell debris is removed by centrifugation, and the supernatant containing the polypeptide is loaded onto a nickel-nitrilo-tri-acetic acid (“Ni-NTA”) affinity resin column (available from QIAGEN, Inc., supra). Proteins with a 6 x His tag bind to the Ni-NTA resin with high affinity and can be purified in a simple one-step procedure (for details see: The QIAexpressionist (1995) QIAGEN, Inc., supra).

[0935] Briefly, the supernatant is loaded onto the column in 6 M guanidine-HCl, pH 8. The column is first washed with 10 volumes of 6 M guanidine-HCl, pH 8, then washed with 10 volumes of 6 M guanidine-HCl pH 6, and finally the polypeptide is eluted with 6 M guanidine-HCl, pH 5.

[0936] The purified protein is then renatured by dialyzing it against phosphate-buffered saline (PBS) or 50 mM Na-acetate, pH 6 buffer plus 200 mM NaCl. Alternatively, the protein can be successfully refolded while immobilized on the Ni-NTA column. The recommended conditions are as follows: renature using a linear 6M-1M urea gradient in 500 mM NaCl, 20% glycerol, 20 mM Tris/HCl pH 7.4, containing protease inhibitors. The renaturation should be performed over a period of 1.5 hours or more. After renaturation the proteins are eluted by the addition of 250 mM immidazole. Immidazole is removed by a final dialyzing step against PBS or 50 mM sodium acetate pH 6 buffer plus 200 mM NaCl. The purified protein is stored at 4° C. or frozen at −80° C.

[0937] In addition to the above expression vector, the present invention further includes an expression vector, called pHE4a (ATCC Accession Number 209645, deposited on Feb. 25, 1998) which contains phage operator and promoter elements operatively linked to a polynucleotide of the present invention. This vector contains: 1) a neomycinphosphotransferase gene as a selection marker, 2) an E. coli origin of replication, 3) a T5 phage promoter sequence, 4) two lac operator sequences, 5) a Shine-Delgarno sequence, and 6) the lactose operon repressor gene (lacIq). The origin of replication (oriC) is derived from pUC19 (LTI, Gaithersburg, Md.). The promoter and operator sequences are made synthetically.

[0938] DNA can be inserted into the pHE4a by restricting the vector with NdeI and XbaI, BamHI, XhoI, or Asp718, running the restricted product on a gel, and isolating the larger fragment (the stuffer fragment should be about 310 base pairs). The DNA insert is generated according to the PCR protocol described in Example 1, using PCR primers having restriction sites for NdeI (5′ primer) and XbaI, BamHI, XhoI, or Asp718 (3′ primer). The PCR insert is gel purified and restricted with compatible enzymes. The insert and vector are ligated according to standard protocols.

[0939] The engineered vector could easily be substituted in the above protocol to express protein in a bacterial system.

### Example 6

### Purification of a Polypeptide from an Inclusion Body

[0940] The following alternative method can be used to purify a polypeptide expressed in E coli when it is present in the form of inclusion bodies. Unless otherwise specified, all of the following steps are conducted at 4-10° C.

[0941] Upon completion of the production phase of the E. coli fermentation, the cell culture is cooled to 4-10° C. and the cells harvested by continuous centrifugation at 15,000 rpm (Heraeus Sepatech). On the basis of the expected yield of protein per unit weight of cell paste and the amount of purified protein required, an appropriate amount of cell paste, by weight, is suspended in a buffer solution containing 100 mM Tris, 50 mM EDTA, pH 7.4. The cells are dispersed to a homogeneous suspension using a high shear mixer.

[0942] The cells are then lysed by passing the solution through a microfluidizer (Microfuidics, Corp. or APV Gaulin, Inc.) twice at 4000-6000 psi. The homogenate is then mixed with NaCl solution to a final concentration of 0.5 M NaCl, followed by centrifugation at 7000× g for 15 min. The resultant pellet is washed again using 0.5M NaCl, 100 mM Tris, 50 mM EDTA, pH 7.4.

[0943] The resulting washed inclusion bodies are solubilized with 1.5 M guanidine hydrochloride (GuHCl) for 2-4 hours. After 7000× g centrifugation for 15 min., the pellet is discarded and the polypeptide containing supernatant is incubated at 4° C. overnight to allow further GuHCl extraction.

[0944] Following high speed centrifugation (30,000× g) to remove insoluble particles, the GuHCl solubilized protein is refolded by quickly mixing the GuHCl extract with 20 volumes of buffer containing 50 mM sodium, pH 4.5, 150 mM NaCl, 2 mM EDTA by vigorous stirring. The refolded diluted protein solution is kept at 4° C. without mixing for 12 hours prior to further purification steps.

[0945] To clarify the refolded polypeptide solution, a previously prepared tangential filtration unit equipped with 0.16 μm membrane filter with appropriate surface area (e.g., Filtron), equilibrated with 40 mM sodium acetate, pH 6.0 is employed. The filtered sample is loaded onto a cation exchange resin (e.g., Poros HS-50, Perseptive Biosystems). The column is washed with 40 mM sodium acetate, pH 6.0 and eluted with 250 mM, 500 mM, 1000 mM, and 1500 mM NaCl in the same buffer, in a stepwise manner. The absorbance at 280 nm of the effluent is continuously monitored. Fractions are collected and further analyzed by SDS-PAGE.

[0946] Fractions containing the polypeptide are then pooled and mixed with 4 volumes of water. The diluted sample is then loaded onto a previously prepared set of tandem columns of strong anion (Poros HQ-50, Perseptive Biosystems) and weak anion (Poros CM-20, Perseptive Biosystems) exchange resins. The columns are equilibrated with 40 mM sodium acetate, pH 6.0. Both columns are washed with 40 mM sodium acetate, pH 6.0, 200 mM NaCl. The CM-20 column is then eluted using a 10 column volume linear gradient ranging from 0.2 M NaCl, 50 mM sodium acetate, pH 6.0 to 1.0 M NaCl, 50 mM sodium acetate, pH 6.5. Fractions are collected under constant A₂₈₀ monitoring of the effluent. Fractions containing the polypeptide (determined, for instance, by 16% SDS-PAGE) are then pooled.

[0947] The resultant polypeptide should exhibit greater than 95% purity after the above refolding and purification steps. No major contaminant bands should be observed from Commassie blue stained 16% SDS-PAGE gel when 5 μg of purified protein is loaded. The purified protein can also be tested for endotoxin/LPS contamination, and typically the LPS content is less than 0.1 ng/ml according to LAL assays.

### Example 7

### Cloning and Expression of a Polypeptide in a Baculovirus Expression System

[0948] In this example, the plasmid shuttle vector pA2 is used to insert a polynucleotide into a baculovirus to express a polypeptide. This expression vector contains the strong polyhedrin promoter of the Autographa californica nuclear polyhedrosis virus (AcMNPV) followed by convenient restriction sites such as BamHI, Xba I and Asp718. The polyadenylation site of the simian virus 40 (“SV40”) is used for efficient polyadenylation. For easy selection of recombinant virus, the plasmid contains the beta-galactosidase gene from E. coli under control of a weak Drosophila promoter in the same orientation, followed by the polyadenylation signal of the polyhedrin gene. The inserted genes are flanked on both sides by viral sequences for cell-mediated homologous recombination with wild-type viral DNA to generate a viable virus that express the cloned polynucleotide.

[0949] Many other baculovirus vectors can be used in place of the vector above, such as pAc373, pVL941, and pAcIM1, as one skilled in the art would readily appreciate, as long as the construct provides appropriately located signals for transcription, translation, secretion and the like, including a signal peptide and an in-frame AUG as required. Such vectors are described, for instance, in Luckow et al., Virology 170:31-39 (1989).

[0950] Specifically, the cDNA sequence contained in the deposited clone, including the AUG initiation codon, is amplified using the PCR protocol described in Example 1. If a naturally occurring signal sequence is used to produce the polypeptide of the present invention, the pA2 vector does not need a second signal peptide. Alternatively, the vector can be modified (pA2 GP) to include a baculovirus leader sequence, using the standard methods described in Summers et al., “A Manual of Methods for Baculovirus Vectors and Insect Cell Culture Procedures,” Texas Agricultural Experimental Station Bulletin No. 1555 (1987).

[0951] The amplified fragment is isolated from a 1% agarose gel using a commercially available kit (“Geneclean,” BIO 101 Inc., La Jolla, Calif.). The fragment then is digested with appropriate restriction enzymes and again purified on a 1% agarose gel.

[0952] The plasmid is digested with the corresponding restriction enzymes and optionally, can be dephosphorylated using calf intestinal phosphatase, using routine procedures known in the art. The DNA is then isolated from a 1% agarose gel using a commercially available kit (“Geneclean” BIO 101 Inc., La Jolla, Calif.).

[0953] The fragment and the dephosphorylated plasmid are ligated together with T4 DNA ligase. E. coli HB101 or other suitable E. coli hosts such as XL-1 Blue (Stratagene Cloning Systems, La Jolla, Calif.) cells are transformed with the ligation mixture and spread on culture plates. Bacteria containing the plasmid are identified by digesting DNA from individual colonies and analyzing the digestion product by gel electrophoresis. The sequence of the cloned fragment is confirmed by DNA sequencing.

[0954] Five μg of a plasmid containing the polynucleotide is co-transfected with 1.0 μg of a commercially available linearized baculovirus DNA (“BaculoGold™ baculovirus DNA”, Pharmingen, San Diego, Calif.), using the lipofection method described by Felgner et al., Proc. Natl. Acad. Sci. USA 84:7413-7417 (1987). One μg of BaculoGold™ virus DNA and 5 μg of the plasmid are mixed in a sterile well of a microtiter plate containing 50 μl of serum-free Grace's medium (Life Technologies Inc., Gaithersburg, Md.). Afterwards, 10 μl Lipofectin plus 90 μl Grace's medium are added, mixed and incubated for 15 minutes at room temperature. Then the transfection mixture is added drop-wise to Sf9 insect cells (ATCC CRL 1711) seeded in a 35 mm tissue culture plate with 1 ml Grace's medium without serum. The plate is then incubated for 5 hours at 27° C. The transfection solution is then removed from the plate and 1 ml of Grace's insect medium supplemented with 10% fetal calf serum is added. Cultivation is then continued at 27° C. for four days.

[0955] After four days the supernatant is collected and a plaque assay is performed, as described by Summers and Smith, supra. An agarose gel with “Blue Gal” (Life Technologies Inc., Gaithersburg) is used to allow easy identification and isolation of gal-expressing clones, which produce blue-stained plaques. (A detailed description of a “plaque assay” of this type can also be found in the user's guide for insect cell culture and baculovirology distributed by Life Technologies Inc., Gaithersburg, page 9-10.) After appropriate incubation, blue stained plaques are picked with the tip of a micropipettor (e.g., Eppendorf). The agar containing the recombinant viruses is then resuspended in a microcentrifuge tube containing 200 μl of Grace's medium and the suspension containing the recombinant baculovirus is used to infect Sf9 cells seeded in 35 mm dishes. Four days later the supernatants of these culture dishes are harvested and then they are stored at 4° C.

[0956] To verify the expression of the polypeptide, Sf9 cells are grown in Grace's medium supplemented with 10% heat-inactivated FBS. The cells are infected with the recombinant baculovirus containing the polynucleotide at a multiplicity of infection (“MOI”) of about 2. If radiolabeled proteins are desired, 6 hours later the medium is removed and is replaced with SF900 II medium minus methionine and cysteine (available from Life Technologies Inc., Rockville, Md.). After 42 hours, 5 μCi of ³⁵S-methionine and 5 μCi ³⁵S-cysteine (available from Amersham) are added. The cells are further incubated for 16 hours and then are harvested by centrifugation. The proteins in the supernatant as well as the intracellular proteins are analyzed by SDS-PAGE followed by autoradiography (if radiolabeled).

[0957] Microsequencing of the amino acid sequence of the amino terminus of purified protein may be used to determine the amino terminal sequence of the produced protein.

### Example 8

### Expression of a Polypeptide in Mammalian Cells

[0958] The polypeptide of the present invention can be expressed in a mammalian cell. A typical mammalian expression vector contains a promoter element, which mediates the initiation of transcription of mRNA, a protein coding sequence, and signals required for the termination of transcription and polyadenylation of the transcript. Additional elements include enhancers, Kozak sequences and intervening sequences flanked by donor and acceptor sites for RNA splicing. Highly efficient transcription is achieved with the early and late promoters from SV40, the long terminal repeats (LTRs) from Retroviruses, e.g., RSV, HTLVI, HIVI and the early promoter of the cytomegalovirus (CMV). However, cellular elements can also be used (e.g., the human actin promoter).

[0959] Suitable expression vectors for use in practicing the present invention include, for example, vectors such as pSVL and pMSG (Pharmacia, Uppsala, Sweden), pRSVcat (ATCC 37152), pSV2dhfr (ATCC 37146), pBC12MI (ATCC 67109), pCMVSport 2.0, and pCMVSport 3.0. Mammalian host cells that could be used include, human Hela, 293, H9 and Jurkat cells, mouse NIH3T3 and C127 cells, Cos 1, Cos 7 and CV1, quail QC1-3 cells, mouse L cells and Chinese hamster ovary (CHO) cells.

[0960] Alternatively, the polypeptide can be expressed in stable cell lines containing the polynucleotide integrated into a chromosome. The co-transfection with a selectable marker such as DHFR, gpt, neomycin, or hygromycin allows the identification and isolation of the transfected cells.

[0961] The transfected gene can also be amplified to express large amounts of the encoded protein. The DHFR (dihydrofolate reductase) marker is useful in developing cell lines that carry several hundred or even several thousand copies of the gene of interest. (See, e.g., Alt, F. W., et al., J. Biol. Chem. 253:1357-1370 (1978); Hamlin, J. L. and Ma, C., Biochem. et Biophys. Acta, 1097:107-143 (1990); Page, M. J. and Sydenham, M. A., Biotechnology 9:64-68 (1991).) Another useful selection marker is the enzyme glutamine synthase (GS) (Murphy et al., Biochem J. 227:277-279 (1991); Bebbington et al., Bio/Technology 10:169-175 (1992). Using these markers, the mammalian cells are grown in selective medium and the cells with the highest resistance are selected. These cell lines contain the amplified gene(s) integrated into a chromosome. Chinese hamster ovary (CHO) and NSO cells are often used for the production of proteins.

[0962] Derivatives of the plasmid pSV2-dhfr (ATCC Accession No. 37146), the expression vectors pC4 (ATCC Accession No. 209646) and pC6 (ATCC Accession No.209647) contain the strong promoter (LTR) of the Rous Sarcoma Virus (Cullen et al., Molecular and Cellular Biology, 438-447 (March, 1985)) plus a fragment of the CMV-enhancer (Boshart et al., Cell 41:521-530 (1985).) Multiple cloning sites, e.g., with the restriction enzyme cleavage sites BamHI, XbaI and Asp718, facilitate the cloning of the gene of interest. The vectors also contain the 3′ intron, the polyadenylation and termination signal of the rat preproinsulin gene, and the mouse DHFR gene under control of the SV40 early promoter.

[0963] Specifically, the plasmid pC6, for example, is digested with appropriate restriction enzymes and then dephosphorylated using calf intestinal phosphates by procedures known in the art. The vector is then isolated from a 1% agarose gel.

[0964] A polynucleotide of the present invention is amplified according to the protocol outlined in Example 1. If a naturally occurring signal sequence is used to produce the polypeptide of the present invention, the vector does not need a second signal peptide. Alternatively, if a naturally occurring signal sequence is not used, the vector can be modified to include a heterologous signal sequence. (See, e.g., International Publication No. WO 96/34891.)

[0965] The amplified fragment is isolated from a 1% agarose gel using a commercially available kit (“Geneclean,” BIO 101 Inc., La Jolla, Calif.). The fragment then is digested with appropriate restriction enzymes and again purified on a 1% agarose gel.

[0966] The amplified fragment is then digested with the same restriction enzyme and purified on a 1% agarose gel. The isolated fragment and the dephosphorylated vector are then ligated with T4 DNA ligase. E. coli HB101 or XL-1 Blue cells are then transformed and bacteria are identified that contain the fragment inserted into plasmid pC6 using, for instance, restriction enzyme analysis.

[0967] Chinese hamster ovary cells lacking an active DHFR gene is used for transfection. Five μg of the expression plasmid pC6 or pC4 is cotransfected with 0.5 μg of the plasmid pSVneo using lipofectin (Felgner et al., supra). The plasmid pSV2-neo contains a dominant selectable marker, the neo gene from Tn5 encoding an enzyme that confers resistance to a group of antibiotics including G418. The cells are seeded in alpha minus MEM supplemented with 1 mg/ml G418. After 2 days, the cells are trypsinized and seeded in hybridoma cloning plates (Greiner, Germany) in alpha minus MEM supplemented with 10, 25, or 50 ng/ml of methotrexate plus 1 mg/ml G418. After about 10-14 days single clones are trypsinized and then seeded in 6-well petri dishes or 10 ml flasks using different concentrations of methotrexate (50 nM, 100 nM, 200 nM, 400 nM, 800 nM). Clones growing at the highest concentrations of methotrexate are then transferred to new 6-well plates containing even higher concentrations of methotrexate (1 μM, 2 μM, 5 μM, 10 mM, 20 mM). The same procedure is repeated until clones are obtained which grow at a concentration of 100-200 μM. Expression of the desired gene product is analyzed, for instance, by SDS-PAGE and Western blot or by reversed phase HPLC analysis.

### Example 9

### Protein Fusions

[0968] The polypeptides of the present invention are preferably fused to other proteins. These fusion proteins can be used for a variety of applications. For example, fusion of the present polypeptides to His-tag, HA-tag, protein A, IgG domains, and maltose binding protein facilitates purification. (See Example 5; see also EP A 394,827; Traunecker, et al., Nature 331:84-86 (1988).) Similarly, fusion to IgG-1, IgG-3, and albumin increases the halflife time in vivo. Nuclear localization signals fused to the polypeptides of the present invention can target the protein to a specific subcellular localization, while covalent heterodimer or homodimers can increase or decrease the activity of a fusion protein. Fusion proteins can also create chimeric molecules having more than one function. Finally, fusion proteins can increase solubility and/or stability of the fused protein compared to the non-fused protein. All of the types of fusion proteins described above can be made by modifying the following protocol, which outlines the fusion of a polypeptide to an IgG molecule, or the protocol described in Example 5.

[0969] Briefly, the human Fc portion of the IgG molecule can be PCR amplified, using primers that span the 5′ and 3′ ends of the sequence described below. These primers also should have convenient restriction enzyme sites that will facilitate cloning into an expression vector, preferably a mammalian expression vector.

[0970] For example, if pC4 (ATCC Accession No. 209646) is used, the human Fc portion can be ligated into the BamHI cloning site. Note that the 3′ BamHI site should be destroyed. Next, the vector containing the human Fc portion is re-restricted with BamHI, linearizing the vector, and a polynucleotide of the present invention, isolated by the PCR protocol described in Example 1, is ligated into this BamHI site. Note that the polynucleotide is cloned without a stop codon, otherwise a fusion protein will not be produced.

[0971] If the naturally occurring signal sequence is used to produce the polypeptide of the present invention, pC4 does not need a second signal peptide. Alternatively, if the naturally occurring signal sequence is not used, the vector can be modified to include a heterologous signal sequence. (See, e.g., International Publication No. WO 96/34891.)

Human IgG Fc region:

(SEQ ID NO:1)

GGGATCCGGAGCCCAAATCTTCTGACAAAACTCACACATGCCCACCGTGC
CCAGCACCTGAATTCGAGGGTGCACCGTCAGTCTTCCTCTTCCCCCCAAA
ACCCAAGGACACCCTCATGATCTCCCGGACTCCTGAGGTCACATGCGTGG
TGGTGGACGTAAGCCACGAAGACCCTGAGGTCAAGTTCAACTGGTACGTG
GACGGCGTGGAGGTGCATAATGCCAAGACAAAGCCGCGGGAGGAGCAGTA
CAACAGCACGTACCGTGTGGTCAGCGTCCTCACCGTCCTGCACCAGGACT
GGCTGAATGGCAAGGAGTACAAGTGCAAGGTCTCCAACAAAGCCCTCCCA
ACCCCCATCGAGAAAACCATCTCCAAAGCCAAAGGGCAGCCCCGAGAACC
ACAGGTGTACACCCTGCCCCCATCCCGGGATGAGCTGACCAAGAACCAGG
TCAGCCTGACCTGCCTGGTCAAAGGCTTCTATCCAAGCGACATCGCCGTG
GAGTGGGAGAGCAATGGGCAGCCGGAGAACAACTACAAGACCACGCCTCC
CGTGCTGGACTCCGACGGCTCCTTCTTCCTCTACAGCAAGCTCACCGTGG
ACAAGAGCAGGTGGCAGCAGGGGAACGTCTTCTCATGCTCCGTGATGCAT
GAGGCTCTGCACAACCACTACACGCAGAAGAGCCTCTCCCTGTCTCCGGG
TAAATGAGTGCGACGGCCGCGACTCTAGAGGAT

### Example 10

### Production of an Antibody from a Polypeptide

[0972] Hybridoma Technology

[0973] The antibodies of the present invention can be prepared by a variety of methods. (See, Current Protocols, Chapter 2.) As one example of such methods, cells expressing polypeptide of the present invention are administered to an animal to induce the production of sera containing polyclonal antibodies. In a preferred method, a preparation of polypeptide of the present invention is prepared and purified to render it substantially free of natural contaminants. Such a preparation is then introduced into an animal in order to produce polyclonal antisera of greater specific activity.

[0974] Monoclonal antibodies specific for polypeptide of the present invention are prepared using hybridoma technology (Kohler et al., Nature 256:495 (1975); Kohler et al., Eur. J. Immunol. 6:511 (1976); Kohler et al., Eur. J. Immunol. 6:292 (1976); Hammerling et al., in: Monoclonal Antibodies and T-Cell Hybridomas, Elsevier, N.Y., pp. 563-681 (1981)). In general, an animal (preferably a mouse) is immunized with polypeptide of the present invention or, more preferably, with a secreted polypeptide of the present invention-expressing cell. Such polypeptide-expressing cells are cultured in any suitable tissue culture medium, preferably in Earle's modified Eagle's medium supplemented with 10% fetal bovine serum (inactivated at about 56° C.), and supplemented with about 10 g/l of nonessential amino acids, about 1,000 U/ml of penicillin, and about 100 μg/ml of streptomycin.

[0975] The splenocytes of such mice are extracted and fused with a suitable myeloma cell line. Any suitable myeloma cell line may be employed in accordance with the present invention; however, it is preferable to employ the parent myeloma cell line (SP2O), available from the ATCC. After fusion, the resulting hybridoma cells are selectively maintained in HAT medium, and then cloned by limiting dilution as described by Wands et al. (Gastroenterology 80:225-232 (1981)). The hybridoma cells obtained through such a selection are then assayed to identify clones which secrete antibodies capable of binding the polypeptide of the present invention.

[0976] Alternatively, additional antibodies capable of binding to polypeptide of the present invention can be produced in a two-step procedure using anti-idiotypic antibodies. Such a method makes use of the fact that antibodies are themselves antigens, and therefore, it is possible to obtain an antibody which binds to a second antibody. In accordance with this method, protein specific antibodies are used to immunize an animal, preferably a mouse. The splenocytes of such an animal are then used to produce hybridoma cells, and the hybridoma cells are screened to identify clones which produce an antibody whose ability to bind to the polypeptide of the present invention-specific antibody can be blocked by polypeptide of the present invention. Such antibodies comprise anti-idiotypic antibodies to the polypeptide of the present invention-specific antibody and are used to immunize an animal to induce formation of further polypeptide of the present invention-specific antibodies.

[0977] For in vivo use of antibodies in humans, an antibody is “humanized”. Such antibodies can be produced using genetic constructs derived from hybridoma cells producing the monoclonal antibodies described above. Methods for producing chimeric and humanized antibodies are known in the art and are discussed herein. (See, for review, Morrison, Science 229:1202 (1985); Oi et al., BioTechniques 4:214 (1986); Cabilly et al., U.S. Pat. No. 4,816,567; Taniguchi et al., EP 171496; Morrison et al., EP 173494; Neuberger et al., WO 8601533; Robinson et al., International Publication No. WO 8702671; Boulianne et al., Nature 312:643 (1984); Neuberger et al., Nature 314:268 (1985).)

[0978] Isolation of Antibody Fragments Directed Against Polypeptide of the Present Invention from a Library of scFvs

[0979] Naturally occurring V-genes isolated from human PBLs are constructed into a library of antibody fragments which contain reactivities against polypeptide of the present invention to which the donor may or may not have been exposed (see e.g., U.S. Pat. No. 5,885,793 incorporated herein by reference in its entirety).

[0980] Rescue of the Library. A library of scFvs is constructed from the RNA of human PBLs as described in International Publication No. WO 92/01047. To rescue phage displaying antibody fragments, approximately 10⁹ E. coli harboring the phagemid are used to inoculate 50 ml of 2× TY containing 1% glucose and 100 μg/ml of ampicillin (2× TY-AMP-GLU) and grown to an O.D. of 0.8 with shaking. Five ml of this culture is used to inoculate 50 ml of 2× TY-AMP-GLU, 2×10⁸ TU of delta gene 3 helper (M13 delta gene III, see International Publication No. WO 92/01047) are added and the culture incubated at 37° C. for 45 minutes without shaking and then at 37° C. for 45 minutes with shaking. The culture is centrifuged at 4000 r.p.m. for 10 min. and the pellet resuspended in 2 liters of 2× TY containing 100 μg/ml ampicillin and 50 ug/ml kanamycin and grown overnight. Phage are prepared as described in International Application No. WO 92/01047.

[0981] M13 delta gene III is prepared as follows: M13 delta gene III helper phage does not encode gene III protein, hence the phage(mid) displaying antibody fragments have a greater avidity of binding to antigen. Infectious M13 delta gene III particles are made by growing the helper phage in cells harboring a pUC19 derivative supplying the wild type gene III protein during phage morphogenesis. The culture is incubated for 1 hour at 37° C. without shaking and then for a further hour at 37° C. with shaking. Cells are spun down (IEC-Centra 8,400 r.p.m. for 10 min), resuspended in 300 ml 2× TY broth containing 100 μg ampicillin/ml and 25 μg kanamycin/ml (2× TY-AMP-KAN) and grown overnight, shaking at 37° C. Phage particles are purified and concentrated from the culture medium by two PEG-precipitations (Sambrook et al., 1990), resuspended in 2 ml PBS and passed through a 0.45 μm filter (Minisart NML; Sartorius) to give a final concentration of approximately 10¹³ transducing units/ml (ampicillin-resistant clones).

[0982] Panning of the Library. Immunotubes (Nunc) are coated overnight in PBS with 4 ml of either 100 μg/ml or 10 μg/ml of a polypeptide of the present invention. Tubes are blocked with 2% Marvel-PBS for 2 hours at 37° C. and then washed 3 times in PBS. Approximately 10¹³ TU of phage is applied to the tube and incubated for 30 minutes at room temperature tumbling on an over and under turntable and then left to stand for another 1.5 hours. Tubes are washed 10 times with PBS 0.1% Tween-20 and 10 times with PBS. Phage are eluted by adding 1 ml of 100 mM triethylamine and rotating 15 minutes on an under and over turntable after which the solution is immediately neutralized with 0.5 ml of 1.0M Tris-HCl, pH 7.4. Phage are then used to infect 10 ml of mid-log E. coli TGI by incubating eluted phage with bacteria for 30 minutes at 37° C. The E. coli are then plated on TYE plates containing 1% glucose and 100 μg/ml ampicillin. The resulting bacterial library is then rescued with delta gene 3 helper phage as described above to prepare phage for a subsequent round of selection. This process is then repeated for a total of 4 rounds of affinity purification with tube-washing increased to 20 times with PBS, 0.1% Tween-20 and 20 times with PBS for rounds 3 and 4.

[0983] Characterization of Binders. Eluted phage from the 3rd and 4th rounds of selection are used to infect E. coli HB 2151 and soluble scFv is produced (Marks, et al., 1991) from single colonies for assay. ELISAs are performed with microtitre plates coated with 10 pg/ml of the polypeptide of the present invention in 50 mM bicarbonate pH 9.6. Clones positive in ELISA are further characterized by PCR fingerprinting (see, e.g., International Application No. WO 92/01047) and then by sequencing. These ELISA positive clones may also be further characterized by techniques known in the art, such as, for example, epitope mapping, binding affinity, receptor signal transduction, ability to block or competitively inhibit antibody/antigen binding, and competitive agonistic or antagonistic activity.

### Example 11

### Method of Determining Alterations in a Gene Corresponding to a Polynucleotide

[0984] RNA isolated from entire families or individual patients presenting with a phenotype of interest (such as a disease) is isolated. cDNA is then generated from these RNA samples using protocols known in the art. (See, Sambrook.) The CDNA is then used as a template for PCR, employing primers surrounding regions of interest in SEQ ID NO:X; and/or the nucleotide sequence of the cDNA contained in Clone ID NO:Z. Suggested PCR conditions consist of 35 cycles at 95 degrees C. for 30 seconds; 60-120 seconds at 52-58 degrees C.; and 60-120 seconds at 70 degrees C., using buffer solutions described in Sidransky et al., Science 252:706 (1991).

[0985] PCR products are then sequenced using primers labeled at their 5′ end with T4 polynucleotide kinase, employing SequiTherm Polymerase (Epicentre Technologies). The intron-exon boundaries of selected exons is also determined and genomic PCR products analyzed to confirm the results. PCR products harboring suspected mutations are then cloned and sequenced to validate the results of the direct sequencing.

[0986] PCR products are cloned into T-tailed vectors as described in Holton et al., Nucleic Acids Research, 19:1156 (1991) and sequenced with T7 polymerase (United States Biochemical). Affected individuals are identified by mutations not present in unaffected individuals.

[0987] Genomic rearrangements are also observed as a method of determining alterations in a gene corresponding to a polynucleotide. Genomic clones isolated according to Example 2 are nick-translated with digoxigenindeoxy-uridine 5′-triphosphate (Boehringer Manheim), and FISH performed as described in Johnson et al., Methods Cell Biol. 35:73-99 (1991). Hybridization with the labeled probe is carried out using a vast excess of human cot-i DNA for specific hybridization to the corresponding genomic locus.

[0988] Chromosomes are counterstained with 4,6-diamino-2-phenylidole and propidium iodide, producing a combination of C- and R-bands. Aligned images for precise mapping are obtained using a triple-band filter set (Chroma Technology, Brattleboro, Vt.) in combination with a cooled charge-coupled device camera (Photometrics, Tucson, Ariz.) and variable excitation wavelength filters. (Johnson et al., Genet. Anal. Tech. Appl., 8:75 (1991).) Image collection, analysis and chromosomal fractional length measurements are performed using the ISee Graphical Program System. (Inovision Corporation, Durham, N.C.) Chromosome alterations of the genomic region hybridized by the probe are identified as insertions, deletions, and translocations. These alterations are used as a diagnostic marker for an associated disease.

### Example 12

### Method of Detecting Abnormal Levels of a Polypeptide in a Biological Sample

[0989] A polypeptide of the present invention can be detected in a biological sample, and if an increased or decreased level of the polypeptide is detected, this polypeptide is a marker for a particular phenotype. Methods of detection are numerous, and thus, it is understood that one skilled in the art can modify the following assay to fit their particular needs.

[0990] For example, antibody-sandwich ELISAs are used to detect polypeptides in a sample, preferably a biological sample. Wells of a microtiter plate are coated with specific antibodies, at a final concentration of 0.2 to 10 ug/ml. The antibodies are either monoclonal or polyclonal and are produced by the method described in Example 10. The wells are blocked so that non-specific binding of the polypeptide to the well is reduced.

[0991] The coated wells are then incubated for >2 hours at RT with a sample containing the polypeptide. Preferably, serial dilutions of the sample should be used to validate results. The plates are then washed three times with deionized or distilled water to remove unbound polypeptide.

[0992] Next, 50 ul of specific antibody-alkaline phosphatase conjugate, at a concentration of 25-400 ng, is added and incubated for 2 hours at room temperature. The plates are again washed three times with deionized or distilled water to remove unbound conjugate.

[0993] Add 75 ul of 4-methylumbelliferyl phosphate (MUP) or p-nitrophenyl phosphate (NPP) substrate solution to each well and incubate 1 hour at room temperature. Measure the reaction by a microtiter plate reader. Prepare a standard curve, using serial dilutions of a control sample, and plot polypeptide concentration on the X-axis (log scale) and fluorescence or absorbance of the Y-axis (linear scale). Interpolate the concentration of the polypeptide in the sample using the standard curve.

### Example 13

### Formulation

[0994] The invention also provides methods of treatment and/or prevention of diseases or disorders (such as, for example, any one or more of the diseases or disorders disclosed herein) by administration to a subject of an effective amount of a Therapeutic. By therapeutic is meant polynucleotides or polypeptides of the invention (including fragments and variants), agonists or antagonists thereof, and/or antibodies thereto, in combination with a pharmaceutically acceptable carrier type (e.g., a sterile carrier).

[0995] The Therapeutic will be formulated and dosed in a fashion consistent with good medical practice, taking into account the clinical condition of the individual patient (especially the side effects of treatment with the Therapeutic alone), the site of delivery, the method of administration, the scheduling of administration, and other factors known to practitioners. The “effective amount” for purposes herein is thus determined by such considerations.

[0996] As a general proposition, the total pharmaceutically effective amount of the Therapeutic administered parenterally per dose will be in the range of about 1 ug/kg/day to 10 mg/kg/day of patient body weight, although, as noted above, this will be subject to therapeutic discretion. More preferably, this dose is at least 0.01 mg/kg/day, and most preferably for humans between about 0.01 and 1 mg/kg/day for the hormone. If given continuously, the Therapeutic is typically administered at a dose rate of about 1 ug/kg/hour to about 50 ug/kg/hour, either by 1-4 injections per day or by continuous subcutaneous infusions, for example, using a mini-pump. An intravenous bag solution may also be employed. The length of treatment needed to observe changes and the interval following treatment for responses to occur appears to vary depending on the desired effect.

[0997] Therapeutics can be are administered orally, rectally, parenterally, intracistemally, intravaginally, intraperitoneally, topically (as by powders, ointments, gels, drops or transdermal patch), bucally, or as an oral or nasal spray. “Pharmaceutically acceptable carrier” refers to a non-toxic solid, semisolid or liquid filler, diluent, encapsulating material or formulation auxiliary of any. The term “parenteral” as used herein refers to modes of administration which include intravenous, intramuscular, intraperitoneal, intrasternal, subcutaneous and intraarticular injection and infusion.

[0998] Therapeutics of the invention are also suitably administered by sustained-release systems. Suitable examples of sustained-release Therapeutics are administered orally, rectally, parenterally, intracistemally, intravaginally, intraperitoneally, topically (as by powders, ointments, gels, drops or transdermal patch), bucally, or as an oral or nasal spray. “Pharmaceutically acceptable carrier” refers to a non-toxic solid, semisolid or liquid filler, diluent, encapsulating material or formulation auxiliary of any type. The term “parenteral” as used herein refers to modes of administration which include intravenous, intramuscular, intraperitoneal, intrasternal, subcutaneous and intraarticular injection and infusion.

[0999] Therapeutics of the invention are also suitably administered by sustained-release systems. Suitable examples of sustained-release Therapeutics include suitable polymeric materials (such as, for example, semi-permeable polymer matrices in the form of shaped articles, e.g., films, or mirocapsules), suitable hydrophobic materials (for example as an emulsion in an acceptable oil) or ion exchange resins, and sparingly soluble derivatives (such as, for example, a sparingly soluble salt).

[1000] Sustained-release matrices include polylactides (U.S. Pat. No. 3,773,919, EP 58,481), copolymers of L-glutamic acid and gamma-ethyl-L-glutamate (Sidman et al., Biopolymers 22:547-556 (1983)), poly (2-hydroxyethyl methacrylate) (Langer et al., J. Biomed. Mater. Res. 15:167-277 (1981), and Langer, Chem. Tech. 12:98-105 (1982)), ethylene vinyl acetate (Langer et al., Id.) or poly-D-(−)-3-hydroxybutyric acid (EP 133,988).

[1001] Sustained-release Therapeutics also include liposomally entrapped Therapeutics of the invention (see generally, Langer, Science 249:1527-1533 (1990); Treat et al., in Liposomes in the Therapy of Infectious Disease and Cancer, Lopez-Berestein and Fidler (eds.), Liss, New York, pp. 317-327 and 353-365 (1989)). Liposomes containing the Therapeutic are prepared by methods known per se: DE 3,218,121; Epstein et al., Proc. Natl. Acad. Sci. (USA) 82:3688-3692 (1985); Hwang et al., Proc. Natl. Acad. Sci.(USA) 77:4030-4034 (1980); EP 52,322; EP 36,676; EP 88,046; EP 143,949; EP 142,641; Japanese Pat. Appl. 83-118008; U.S. Pat. Nos. 4,485,045 and 4,544,545; and EP 102,324. Ordinarily, the liposomes are of the small (about 200-800 Angstroms) unilamellar type in which the lipid content is greater than about 30 mol. percent cholesterol, the selected proportion being adjusted for the optimal Therapeutic.

[1002] In yet an additional embodiment, the Therapeutics of the invention are delivered by way of a pump (see Langer, supra; Sefton, CRC Crit. Ref. Biomed. Eng. 14:201 (1987); Buchwald et al., Surgery 88:507 (1980); Saudek et al., N. Engl. J. Med. 321:574 (1989)).

[1003] Other controlled release systems are discussed in the review by Langer (Science 249:1527-1533 (1990)).

[1004] For parenteral administration, in one embodiment, the Therapeutic is formulated generally by mixing it at the desired degree of purity, in a unit dosage injectable form (solution, suspension, or emulsion), with a pharmaceutically acceptable carrier, i.e., one that is non-toxic to recipients at the dosages and concentrations employed and is compatible with other ingredients of the formulation. For example, the formulation preferably does not include oxidizing agents and other compounds that are known to be deleterious to the Therapeutic.

[1005] Generally, the formulations are prepared by contacting the Therapeutic uniformly and intimately with liquid carriers or finely divided solid carriers or both. Then, if necessary, the product is shaped into the desired formulation. Preferably the carrier is a parenteral carrier, more preferably a solution that is isotonic with the blood of the recipient. Examples of such carrier vehicles include water, saline, Ringer's solution, and dextrose solution. Non-aqueous vehicles such as fixed oils and ethyl oleate are also useful herein, as well as liposomes.

[1006] The carrier suitably contains minor amounts of additives such as substances that enhance isotonicity and chemical stability. Such materials are non-toxic to recipients at the dosages and concentrations employed, and include buffers such as phosphate, citrate, succinate, acetic acid, and other organic acids or their salts; antioxidants such as ascorbic acid; low molecular weight (less than about ten residues) polypeptides, e.g., polyarginine or tripeptides; proteins, such as serum albumin, gelatin, or immunoglobulins; hydrophilic polymers such as polyvinylpyrrolidone; amino acids, such as glycine, glutamic acid, aspartic acid, or arginine; monosaccharides, disaccharides, and other carbohydrates including cellulose or its derivatives, glucose, manose, or dextrins; chelating agents such as EDTA; sugar alcohols such as mannitol or sorbitol; counterions such as sodium; and/or nonionic surfactants such as polysorbates, poloxamers, or PEG.

[1007] The Therapeutic is typically formulated in such vehicles at a concentration of about 0.1 mg/ml to 100 mg/ml, preferably 1-10 mg/ml, at a pH of about 3 to 8. It will be understood that the use of certain of the foregoing excipients, carriers, or stabilizers will result in the formation of polypeptide salts.

[1008] Any pharmaceutical used for therapeutic administration can be sterile. Sterility is readily accomplished by filtration through sterile filtration membranes (e.g., 0.2 micron membranes). Therapeutics generally are placed into a container having a sterile access port, for example, an intravenous solution bag or vial having a stopper pierceable by a hypodermic injection needle.

[1009] Therapeutics ordinarily will be stored in unit or multi-dose containers, for example, sealed ampoules or vials, as an aqueous solution or as a lyophilized formulation for reconstitution. As an example of a lyophilized formulation, 10-ml vials are filled with 5 ml of sterile-filtered 1% (w/v) aqueous Therapeutic solution, and the resulting mixture is lyophilized. The infusion solution is prepared by reconstituting the lyophilized Therapeutic using bacteriostatic Water-for-Injection.

[1010] The invention also provides a pharmaceutical pack or kit comprising one or more containers filled with one or more of the ingredients of the Therapeutics of the invention. Associated with such container(s) can be a notice in the form prescribed by a governmental agency regulating the manufacture, use or sale of pharmaceuticals or biological products, which notice reflects approval by the agency of manufacture, use or sale for human administration. In addition, the Therapeutics may be employed in conjunction with other therapeutic compounds.

[1011] The Therapeutics of the invention may be administered alone or in combination with adjuvants. Adjuvants that may be administered with the Therapeutics of the invention include, but are not limited to, alum, alum plus deoxycholate (ImmunoAg), MTP-PE (Biocine Corp.), QS21 (Genentech, Inc.), BCG (e.g., THERACYS®), MPL and nonviable prepartions of Corynebacterium parvum. In a specific embodiment, Therapeutics of the invention are administered in combination with alum. In another specific embodiment, Therapeutics of the invention are administered in combination with QS-21. Further adjuvants that may be administered with the Therapeutics of the invention include, but are not limited to, Monophosphoryl lipid immunomodulator, AdjuVax 100a, QS-21, QS-18, CRL1005, Aluminum salts, MF-59, and Virosomal adjuvant technology. Vaccines that may be administered with the Therapeutics of the invention include, but are not limited to, vaccines directed toward protection against MMR (measles, mumps, rubella), polio, varicella, tetanus/diptheria, hepatitis A, hepatitis B, haemophilus influenzae B, whooping cough, pneumonia, influenza, Lyme's Disease, rotavirus, cholera, yellow fever, Japanese encephalitis, poliomyelitis, rabies, typhoid fever, and pertussis. Combinations may be administered either concomitantly, e.g., as an admixture, separately but simultaneously or concurrently; or sequentially. This includes presentations in which the combined agents are administered together as a therapeutic mixture, and also procedures in which the combined agents are administered separately but simultaneously, e.g., as through separate intravenous lines into the same individual. Administration “in combination” further includes the separate administration of one of the compounds or agents given first, followed by the second.

[1012] The Therapeutics of the invention may be administered alone or in combination with other therapeutic agents. Therapeutic agents that may be administered in combination with the Therapeutics of the invention, include but not limited to, chemotherapeutic agents, antibiotics, steroidal and non-steroidal anti-inflammatories, conventional immunotherapeutic agents, and/or therapeutic treatments described below. Combinations may be administered either concomitantly, e.g., as an admixture, separately but simultaneously or concurrently; or sequentially. This includes presentations in which the combined agents are administered together as a therapeutic mixture, and also procedures in which the combined agents are administered separately but simultaneously, e.g., as through separate intravenous lines into the same individual. Administration “in combination” further includes the separate administration of one of the compounds or agents given first, followed by the second.

[1013] In certain embodiments, Therapeutics of the invention are administered in combination with antiretroviral agents, nucleoside/nucleotide reverse transcriptase inhibitors (NRTIs), non-nucleoside reverse transcriptase inhibitors (NNRTIs), and/or protease inhibitors (PIs). NRTIs that may be administered in combination with the Therapeutics of the invention, include, but are not limited to, RETROVIR™ (zidovudine/AZT), VIDEX™ (didanosine/ddI), HIVID™ (zalcitabine/ddC), ZERIT™ (stavudine/d4T), EPIVIR™ (lamivudine/3TC), and COMBIVIR™ (zidovudine/lamivudine). NNRTIs that may be administered in combination with the Therapeutics of the invention, include, but are not limited to, VIRAMUNE™ (nevirapine), RESCRIPTOR™ (delavirdine), and SUSTIVA™ (efavirenz). Protease inhibitors that may be administered in combination with the Therapeutics of the invention, include, but are not limited to, CRIXIVAN™ (indinavir), NORVIR™ (ritonavir), INVIRASE™ (saquinavir), and VIRACEPT™ (nelfinavir). In a specific embodiment, antiretroviral agents, nucleoside reverse transcriptase inhibitors, non-nucleoside reverse transcriptase inhibitors, and/or protease inhibitors may be used in any combination with Therapeutics of the invention to treat AIDS and/or to prevent or treat HIV infection.

[1014] Additional NRTIs include LODENOSINE™ (F-ddA; an acid-stable adenosine NRTI; Triangle/Abbott; COVIRACIL™ (emtricitabine/FTC; structurally related to lamivudine (3TC) but with 3- to 10-fold greater activity in vitro; Triangle/Abbott); dOTC (BCH-10652, also structurally related to lamivudine but retains activity against a substantial proportion of lamivudine-resistant isolates; Biochem Pharma); Adefovir (refused approval for anti-HIV therapy by FDA; Gilead Sciences); PREVEON® (Adefovir Dipivoxil, the active prodrug of adefovir; its active form is PMEA-pp); TENOFOVIR™ (bis-POC PMPA, a PMPA prodrug; Gilead); DAPD/DXG (active metabolite of DAPD; Triangle/Abbott); D-D4FC (related to 3TC, with activity against AZT/3TC-resistant virus); GW420867X (Glaxo Wellcome); ZIAGEN™ (abacavir/159U89; Glaxo Wellcome Inc.); CS-87 (3′azido-2′,3′-dideoxyuridine; WO 99/66936); and S-acyl-2-thioethyl (SATE)-bearing prodrug forms of β-L-FD4C and β-L-FddC (WO 98/17281).

[1015] Additional NNRTIs include COACTINON™ (Emivirine/MKC-442, potent NNRTI of the HEPT class; Triangle/Abbott); CAPRAVIRINE™ (AG-1 549/S-1 153, a next generation NNRTI with activity against viruses containing the K103N mutation; Agouron); PNU-142721 (has 20- to 50-fold greater activity than its predecessor delavirdine and is active against K103N mutants; Pharmacia & Upjohn); DPC-961 and DPC-963 (second-generation derivatives of efavirenz, designed to be active against viruses with the K103N mutation; DuPont); GW-420867X (has 25-fold greater activity than HBY097 and is active against K103N mutants; Glaxo Wellcome); CALANOLIDE A (naturally occurring agent from the latex tree; active against viruses containing either or both the Y181C and K103N mutations); and Propolis (WO 99/49830).

[1016] Additional protease inhibitors include LOPINAVIR™ (ABT378/r; Abbott Laboratories); BMS-232632 (an azapeptide; Bristol-Myres Squibb); TIPRANAVIR™ (PNU-140690, a non-peptic dihydropyrone; Pharmacia & Upjohn); PD-178390 (a nonpeptidic dihydropyrone; Parke-Davis); BMS 232632 (an azapeptide; Bristol-Myers Squibb); L-756,423 (an indinavir analog; Merck); DMP-450 (a cyclic urea compound; Avid & DuPont); AG-1776 (a peptidomimetic with in vitro activity against protease inhibitor-resistant viruses; Agouron); VX-175/GW-433908 (phosphate prodrug of amprenavir; Vertex & Glaxo Welcome); CGP61755 (Ciba); and AGENERASE™ (amprenavir; Glaxo Wellcome Inc.).

[1017] Additional antiretroviral agents include fusion inhibitors/gp41 binders. Fusion inhibitors/gp41 binders include T-20 (a peptide from residues 643-678 of the HIV gp41 transmembrane protein ectodomain which binds to gp41 in its resting state and prevents transformation to the fusogenic state; Trimeris) and T-1249 (a second-generation fusion inhibitor; Trimeris).

[1018] Additional antiretroviral agents include fusion inhibitors/chemokine receptor antagonists. Fusion inhibitors/chemokine receptor antagonists include CXCR4 antagonists such as AMD 3100 (a bicyclam), SDF-1 and its analogs, and ALX40-4C (a cationic peptide), T22 (an 18 amino acid peptide; Trimeris) and the T22 analogs T134 and T140; CCR5 antagonists such as RANTES (9-68), AOP-RANTES, NNY-RANTES, and TAK-779; and CCR5/CXCR4 antagonists such as NSC 651016 (a distamycin analog). Also included are CCR2B, CCR3, and CCR6 antagonists. Chemokine recpetor agonists such as RANTES, SDF-1, MIP-1α, MIP-1β, etc., may also inhibit fusion.

[1019] Additional antiretroviral agents include integrase inhibitors. Integrase inhibitors include dicaffeoylquinic (DFQA) acids; L-chicoric acid (a dicaffeoyltartaric (DCTA) acid); quinalizarin (QLC) and related anthraquinones; ZINTEVIR™ (AR 177, an oligonucleotide that probably acts at cell surface rather than being a true integrase inhibitor; Arondex); and naphthols such as those disclosed in WO 98/50347.

[1020] Additional antiretroviral agents include hydroxyurea-like compunds such as BCX-34 (a purine nucleoside phosphorylase inhibitor; Biocryst); ribonucleotide reductase inhibitors such as DIDOX™ (Molecules for Health); inosine monophosphate dehydrogenase (IMPDH) inhibitors sucha as VX-497 (Vertex); and myvopholic acids such as CellCept (mycophenolate mofetil; Roche).

[1021] Additional antiretroviral agents include inhibitors of viral integrase, inhibitors of viral genome nuclear translocation such as arylene bis(methylketone) compounds; inhibitors of HIV entry such as AOP-RANTES, NNY-RANTES, RANTES-IgG fusion protein, soluble complexes of RANTES and glycosaminoglycans (GAG), and AMD-3100; nucleocapsid zinc finger inhibitors such as dithiane compounds; targets of HIV Tat and Rev; and pharmacoenhancers such as ABT-378.

[1022] Other antiretroviral therapies and adjunct therapies include cytokines and lymphokines such as MIP-1α, MIP-1β, SDF-1α, IL-2, PROLEUKIN™ (aldesleukin/L2-7001; Chiron), IL-4, IL-10, IL-12, and IL-13; interferons such as IFN-α2a; antagonists of TNFs, NFKB, GM-CSF, M-CSF, and IL-10; agents that modulate immune activation such as cyclosporin and prednisone; vaccines such as Remune™ (HIV Immunogen), APL 400-003 (Apollon), recombinant gp120 and fragments, bivalent (B/E) recombinant envelope glycoprotein, rgp120CM235, MN rgp120, SF-2 rgp120, gp120/soluble CD4 complex, Delta JR-FL protein, branched synthetic peptide derived from discontinuous gp120 C3/C4 domain, fusion-competent immunogens, and Gag, Pol, Nef, and Tat vaccines; gene-based therapies such as genetic suppressor elements (GSEs; WO 98/54366), and intrakines (genetically modified CC chemokines targetted to the ER to block surface expression of newly synthesized CCR5 (Yang et al., PNAS 94:11567-72 (1997); Chen et al., Nat. Med. 3:1110-16 (1997)); antibodies such as the anti-CXCR4 antibody 12G5, the anti-CCR5 antibodies 2D7, 5C7, PA8, PA9, PA10, PA11, PA12, and PA14, the anti-CD4 antibodies Q4120 and RPA-T4, the anti-CCR3 antibody 7B11, the anti-gp120 antibodies 17b, 48d, 447-52D, 257-D, 268-D and 50.1, anti-Tat antibodies, anti-TNF-α antibodies, and monoclonal antibody 33A; aryl hydrocarbon (AH) receptor agonists and antagonists such as TCDD, 3,3′,4,4′,5-pentachlorobiphenyl, 3,3′,4,4′-tetrachlorobiphenyl, and α-naphthoflavone (WO 98/30213); and antioxidants such as γ-L-glutamyl-L-cysteine ethyl ester (γ-GCE; WO 99/56764).

[1023] In a further embodiment, the Therapeutics of the invention are administered in combination with an antiviral agent. Antiviral agents that may be administered with the Therapeutics of the invention include, but are not limited to, acyclovir, ribavirin, amantadine, and remantidine.

[1024] In other embodiments, Therapeutics of the invention may be administered in combination with anti-opportunistic infection agents. Anti-opportunistic agents that may be administered in combination with the Therapeutics of the invention, include, but are not limited to, TRIMETHOPRIM-SULFAMETHOXAZOLE , DAPSONE™, PENTAMIDINE™, ATOVAQUONE™, ISONIAZID™, RIFAMPIN™, PYRAZINAMIDE™, ETHAMBUTOL™, RIFABUTIN™, CLARITHROMYCIN™, AZITHROMYCIN™, GANCICLOVIR™, FOSCARNET™, CIDOFOVIR™, FLUCONAZOLE™, ITRACONAZOLE™, KETOCONAZOLE™, ACYCLOVIR™, FAMCICOLVIR™, PYRIMETHAMINE™, LEUCOVORIN™, NEUPOGEN™ (filgrastim/G-CSF), and LEUKINE™ (sargramostim/GM-CSF). In a specific embodiment, Therapeutics of the invention are used in any combination with TRIMETHOPRIM-SULFAMETHOXAZOLE , DAPSONE , PENTAMIDINE™, and/or ATOVAQUONE^{TM} to prophylactically treat or prevent an opportunistic Pneumocystis carinii pneumonia infection. In another specific embodiment, Therapeutics of the invention are used in any combination with ISONIAZID™, RIFAMPIN™, PYRAZINAMIDE™, and/or ETHAMBUTOL™ to prophylactically treat or prevent an opportunistic Mycobacterium avium complex infection. In another specific embodiment, Therapeutics of the invention are used in any combination with RIFABUTIN™, CLARITHROMYCIN™, and/or AZITHROMYCIN™ to prophylactically treat or prevent an opportunistic Mycobacterium tuberculosis methotrexate, thalidomide, methoxsalen, rapamycin, leflunomide, mizoribine (BREDININ™), brequinar, deoxyspergualin, and azaspirane (SKF 105685), ORTHOCLONE OKT® 3 (muromonab-CD3), SANDIMMUNE™, NEORAL™, SANGDYA™ (cyclosporine), PROGRAF® (FK506, tacrolimus), CELLCEPT® (mycophenolate motefil, of which the active metabolite is mycophenolic acid), IMURAN™ (azathioprine), glucocorticosteroids, adrenocortical steroids such as DELTASONE™ (prednisone) and HYDELTRASOL™ (prednisolone), FOLEX™ and MEXATE™ (methotrxate), OXSORALEN-ULTRA™ (methoxsalen) and RAPAMUNE™ (sirolimus). In a specific embodiment, immunosuppressants may be used to prevent rejection of organ or bone marrow transplantation.

[1025] In an additional embodiment, Therapeutics of the invention are administered alone or in combination with one or more intravenous immune globulin preparations. Intravenous immune globulin preparations that may be administered with the Therapeutics of the invention include, but not limited to, GAMMAR™, IVEEGAM™, SANDOGLOBULIN™, GAMMAGARD S/D™, ATGAM™(antithymocyte glubulin), and GAMIMUNE™. In a specific embodiment, Therapeutics of the invention are administered in combination with intravenous immune globulin preparations in transplantation therapy (e.g., bone marrow transplant).

[1026] In certain embodiments, the Therapeutics of the invention are administered alone or in combination with an anti-inflammatory agent. Anti-inflammatory agents that may be administered with the Therapeutics of the invention include, but are not limited to, corticosteroids (e.g. betamethasone, budesonide, cortisone, dexamethasone, hydrocortisone, methylprednisolone, prednisolone, prednisone, and triamcinolone), nonsteroidal anti-inflammatory drugs (e.g., diclofenac, diflunisal, etodolac, fenoprofen, floctafenine, flurbiprofen, ibuprofen, indomethacin, ketoprofen, meclofenamate, mefenamic acid, meloxicam, nabumetone, naproxen, oxaprozin, phenylbutazone, piroxicam, sulindac, tenoxicam, tiaprofenic acid, and tolmetin.), as well as antihistamines, aminoarylcarboxylic acid derivatives, arylacetic acid derivatives, arylbutyric acid derivatives, arylcarboxylic acids, arylpropionic acid derivatives, pyrazoles, pyrazolones, salicylic acid derivatives, thiazinecarboxamides, e-acetamidocaproic acid, S-adenosylmethionine, 3-amino-4-hydroxybutyric acid, amixetrine, bendazac, benzydamine, bucolome, difenpiramide, ditazol, emorfazone, guaiazulene, nabumetone, nimesulide, orgotein, oxaceprol, paranyline, perisoxal, pifoxime, proquazone, proxazole, and tenidap.

[1027] In an additional embodiment, the compositions of the invention are administered alone or in combination with an anti-angiogenic agent. Anti-angiogenic agents that may be administered with the compositions of the invention include, but are not limited to, Angiostatin (Entremed, Rockville, Md.), Troponin-1 (Boston Life Sciences, Boston, Mass.), anti-Invasive Factor, retinoic acid and derivatives thereof, paclitaxel (Taxol), Suramin, Tissue Inhibitor of Metalloproteinase-1, Tissue Inhibitor of Metalloproteinase-2, VEGI, Plasminogen Activator Inhibitor-1, Plasminogen Activator Inhibitor-2, and various forms of the lighter “d group” transition metals.

[1028] Lighter “d group” transition metals include, for example, vanadium, molybdenum, tungsten, titanium, niobium, and tantalum species. Such transition metal species may form transition metal complexes. Suitable complexes of the above-mentioned transition metal species include oxo transition metal complexes.

[1029] Representative examples of vanadium complexes include oxo vanadium complexes such as vanadate and vanadyl complexes. Suitable vanadate complexes include metavanadate and orthovanadate complexes such as, for example, ammonium metavanadate, sodium metavanadate, and sodium orthovanadate. Suitable vanadyl complexes include, for example, vanadyl acetylacetonate and vanadyl sulfate including vanadyl sulfate hydrates such as vanadyl sulfate mono- and trihydrates.

[1030] Representative examples of tungsten and molybdenum complexes also include oxo complexes. Suitable oxo tungsten complexes include tungstate and tungsten oxide complexes. Suitable tungstate complexes include ammonium tungstate, calcium tungstate, sodium tungstate dihydrate, and tungstic acid. Suitable tungsten oxides include tungsten (IV) oxide and tungsten (VI) oxide. Suitable oxo molybdenum complexes include molybdate, molybdenum oxide, and molybdenyl complexes. Suitable molybdate complexes include ammonium molybdate and its hydrates, sodium molybdate and its hydrates, and potassium molybdate and its hydrates. Suitable molybdenum oxides include molybdenum (VI) oxide, molybdenum (VI) oxide, and molybdic acid. Suitable molybdenyl complexes include, for example, molybdenyl acetylacetonate. Other suitable tungsten and molybdenum complexes include hydroxo derivatives derived from, for example, glycerol, tartaric acid, and sugars.

[1031] A wide variety of other anti-angiogenic factors may also be utilized within the context of the present invention. Representative examples include, but are not limited to, platelet factor 4; protamine sulphate; sulphated chitin derivatives (prepared from queen crab shells), (Murata et al., Cancer Res. 51:22-26, (1991)); Sulphated Polysaccharide Peptidoglycan Complex (SP-PG) (the function of this compound may be enhanced by the presence of steroids such as estrogen, and tamoxifen citrate); Staurosporine; modulators of matrix metabolism, including for example, proline analogs, cishydroxyproline, d,L-3,4-dehydroproline, Thiaproline, alpha,alpha-dipyridyl, aminopropionitrile fumarate; 4-propyl-5-(4-pyridinyl)-2(3H)-oxazolone; Methotrexate; Mitoxantrone; Heparin; Interferons; 2 Macroglobulin-serum; ChIMP-3 (Pavloffet al., J. Bio. Chem. 267:17321-17326, (1992)); Chymostatin (Tomkinson et al., Biochem J. 286:475-480, (1992)); Cyclodextrin Tetradecasulfate; Eponemycin; Camptothecin; Fumagillin (Ingber et al., Nature 348:555-557, (1990)); Gold Sodium Thiomalate (“GST”; Matsubara and Ziff, J. Clin. Invest. 79:1440-1446, (1987)); anticollagenase-serum; alpha2-antiplasmin (Holmes et al., J. Biol. Chem. 262(4):1659-1664, (1987)); Bisantrene (National Cancer Institute); Lobenzarit disodium (N-(2)-carboxyphenyl-4-chloroanthronilic acid disodium or “CCA”; (Takeuchi et al., Agents Actions 36:312-316, (1992)); and metalloproteinase inhibitors such as BB94.

[1032] Additional anti-angiogenic factors that may also be utilized within the context of the present invention include Thalidomide, (Celgene, Warren, N.J.); Angiostatic steroid; AGM-1470 (H. Brem and J. Folkman J Pediatr. Surg. 28:445-51 (1993)); an integrin alpha v beta 3 antagonist (C. Storgard et al., J Clin. Invest. 103:47-54 (1999)); carboxynaminolmidazole; Carboxyamidotriazole (CAI) (National Cancer Institute, Bethesda, Md.); Conbretastatin A-4 (CA4P) (OXiGENE, Boston, Mass.); Squalamine (Magainin Pharmaceuticals, Plymouth Meeting, Pa.); TNP-470, (Tap Pharmaceuticals, Deerfield, Ill.); ZD-0101 AstraZeneca (London, UK); APRA (CT2584); Benefin, Byrostatin-1 (SC339555); CGP-41251 (PKC 412); CM101; Dexrazoxane (ICRF187); DMXAA; Endostatin; Flavopridiol; Genestein; GTE; ImmTher; Iressa (ZD1839); Octreotide (Somatostatin); Panretin; Penacillamine; Photopoint; PI-88; Prinomastat (AG-3340) Purlytin; Suradista (FCE26644); Tamoxifen (Nolvadex); Tazarotene; Tetrathiomolybdate; Xeloda (Capecitabine); and 5-Fluorouracil.

[1033] Anti-angiogenic agents that may be administed in combination with the compounds of the invention may work through a variety of mechanisms including, but not limited to, inhibiting proteolysis of the extracellular matrix, blocking the function of endothelial cell-extracellular matrix adhesion molecules, by antagonizing the function of angiogenesis inducers such as growth factors, and inhibiting integrin receptors expressed on proliferating endothelial cells. Examples of anti-angiogenic inhibitors that interfere with extracellular matrix proteolysis and which may be administered in combination with the compositons of the invention include, but are not lmited to, AG-3340 (Agouron, La Jolla, Calif.), BAY-12-9566 (Bayer, West Haven, Conn.), BMS-275291 (Bristol Myers Squibb, Princeton, N.J.), CGS-27032A (Novartis, East Hanover, N.J.), Marimastat (British Biotech, Oxford, UK), and Metastat (Aetema, St-Foy, Quebec). Examples of anti-angiogenic inhibitors that act by blocking the function of endothelial cell-extracellular matrix adhesion molecules and which may be administered in combination with the compositons of the invention include, but are not lmited to, EMD-121974 (Merck KcgaA Darmstadt, Germany) and Vitaxin (Ixsys, La Jolla, Calif./Medimmune, Gaithersburg, Md.). Examples of anti-angiogenic agents that act by directly antagonizing or inhibiting angiogenesis inducers and which may be administered in combination with the compositons of the invention include, but are not lmited to, Angiozyme (Ribozyme, Boulder, Colo.), Anti-VEGF antibody (Genentech, S. San Francisco, Calif.), PTK-787/ZK-225846 (Novartis, Basel, Switzerland), SU-101 (Sugen, S. San Francisco, Calif.), SU-5416 (Sugen/Pharmacia Upjohn, Bridgewater, N.J.), and SU-6668 (Sugen). Other anti-angiogenic agents act to indirectly inhibit angiogenesis. Examples of indirect inhibitors of angiogenesis which may be administered in combination with the compositons of the invention include, but are not limited to, IM-862 (Cytran, Kirkland, Wash.), Interferon-alpha, IL-12 (Roche, Nutley, N.J.), and Pentosan polysulfate (Georgetown University, Washington, D.C.).

[1034] In particular embodiments, the use of compositions of the invention in combination with anti-angiogenic agents is contemplated for the treatment, prevention, and/or amelioration of an autoimmune disease, such as for example, an autoimmune disease described herein.

[1035] In a particular embodiment, the use of compositions of the invention in combination with anti-angiogenic agents is contemplated for the treatment, prevention, and/or amelioration of arthritis. In a more particular embodiment, the use of compositions of the invention in combination with anti-angiogenic agents is contemplated for the treatment, prevention, and/or amelioration of rheumatoid arthritis.

[1036] In another embodiment, the polynucleotides encoding a polypeptide of the present invention are administered in combination with an angiogenic protein, or polynucleotides encoding an angiogenic protein. Examples of angiogenic proteins that may be administered with the compositions of the invention include, but are not limited to, acidic and basic fibroblast growth factors, VEGF-1, VEGF-2, VEGF-3, epidermal growth factor alpha and beta, platelet-derived endothelial cell growth factor, platelet-derived growth factor, tumor necrosis factor alpha, hepatocyte growth factor, insulin-like growth factor, colony stimulating factor, macrophage colony stimulating factor, granulocyte/macrophage colony stimulating factor, and nitric oxide synthase.

[1037] In additional embodiments, compostions of the invention are administered in combination with a chemotherapeutic agent. Chemotherapeutic agents that may be administered with the Therapeutics of the invention include, but are not limited to alkylating agents such as nitrogen mustards (for example, Mechlorethamine, cyclophosphamide, Cyclophosphamide Ifosfamide, Melphalan (L-sarcolysin), and Chlorambucil), ethylenimines and methylmelamines (for example, Hexamethylmelamine and Thiotepa), alkyl sulfonates (for example, Busulfan), nitrosoureas (for example, Carmustine (BCNU), Lomustine (CCNU), Semustine (methyl-CCNU), and Streptozocin (streptozotocin)), triazenes (for example, Dacarbazine (DTIC; dimethyltriazenoimidazolecarboxamide)), folic acid analogs (for example, Methotrexate (amethopterin)), pyrimidine analogs (for example, Fluorouacil (5-fluorouracil; 5-FU), Floxuridine (fluorodeoxyuridine; FudR), and Cytarabine (cytosine arabinoside)), purine analogs and related inhibitors (for example, Mercaptopurine (6-mercaptopurine; 6-MP), Thioguanine (6-thioguanine; TG), and Pentostatin (2′-deoxycoformycin)), vinca alkaloids (for example, Vinblastine (VLB, vinblastine sulfate) and Vincristine (vincristine sulfate)), epipodophyllotoxins (for example, Etoposide and Teniposide), antibiotics (for example, Dactinomycin (actinomycin D), Daunorubicin (daunomycin; rubidomycin), Doxorubicin, Bleomycin, Plicamycin (mithramycin), and Mitomycin (mitomycin C), enzymes (for example, L-Asparaginase), biological response modifiers (for example, Interferon-alpha and interferon-alpha-2b), platinum coordination compounds (for example, Cisplatin (cis-DDP) and Carboplatin), anthracenedione (Mitoxantrone), substituted ureas (for example, Hydroxyurea), methylhydrazine derivatives (for example, Procarbazine (N-methylhydrazine; MIH), adrenocorticosteroids (for example, Prednisone), progestins (for example, Hydroxyprogesterone caproate, Medroxyprogesterone, Medroxyprogesterone acetate, and Megestrol acetate), estrogens (for example, Diethylstilbestrol (DES), Diethylstilbestrol diphosphate, Estradiol, and Ethinyl estradiol), antiestrogens (for example, Tamoxifen), androgens (Testosterone proprionate, and Fluoxymesterone), antiandrogens (for example, Flutamide), gonadotropin-releasing horomone analogs (for example, Leuprolide), other hormones and hormone analogs (for example, methyltestosterone, estramustine, estramustine phosphate sodium, chlorotrianisene, and testolactone), and others (for example, dicarbazine, glutamic acid, and mitotane).

[1038] In one embodiment, the compositions of the invention are administered in combination with one or more of the following drugs: infliximab (also known as Remicade™ Centocor, Inc.), Trocade (Roche, RO-32-3555), Leflunomide (also known as Arava™ from Hoechst Marion Roussel), Kineret™ (an IL-1 Receptor antagonist also known as Anakinra from Amgen, Inc.).

[1039] In a specific embodiment, compositions of the invention are administered in combination with CHOP (cyclophosphamide, doxorubicin, vincristine, and prednisone) or combination of one or more of the components of CHOP. In one embodiment, the compositions of the invention are administered in combination with anti-CD20 antibodies, human monoclonal anti-CD20 antibodies. In another embodiment, the compositions of the invention are administered in combination with anti-CD20 antibodies and CHOP, or anti-CD20 antibodies and any combination of one or more of the components of CHOP, particularly cyclophosphamide and/or prednisone. In a specific embodiment, compositions of the invention are administered in combination with Rituximab. In a further embodiment, compositions of the invention are administered with Rituximab and CHOP, or Rituximab and any combination of one or more of the components of CHOP, particularly cyclophosphamide and/or prednisone. In a specific embodiment, compositions of the invention are administered in combination with tositumomab. In a further embodiment, compositions of the invention are administered with tositumomab and CHOP, or tositumomab and any combination of one or more of the components of CHOP, particularly cyclophosphamide and/or prednisone. The anti-CD20 antibodies may optionally be associated with radioisotopes, toxins or cytotoxic prodrugs.

[1040] In another specific embodiment, the compositions of the invention are administered in combination Zevalin™. In a further embodiment, compositions of the invention are administered with Zevalin™ and CHOP, or Zevalin™ and any combination of one or more of the components of CHOP, particularly cyclophosphamide and/or prednisone. Zevalin™ may be associated with one or more radisotopes. Particularly preferred isotopes are ⁹⁰ Y and ¹¹¹In.

[1041] In an additional embodiment, the Therapeutics of the invention are administered in combination with cytokines. Cytokines that may be administered with the Therapeutics of the invention include, but are not limited to, IL2, IL3, IL4, IL5, IL6, IL7, IL10, IL12, IL13, IL15, anti-CD40, CD40L, IFN-gamma and TNF-alpha. In another embodiment, Therapeutics of the invention may be administered with any interleukin, including, but not limited to, IL-1alpha, IL-1beta, IL-2, IL-3, IL-4, IL-5, IL-6, IL-7, IL-8, IL-9, IL-10, IL-11, IL-12, IL-13, IL-14, IL-15, IL-16, IL-17, IL-18, IL-19, IL-20, and IL-21.

[1042] In one embodiment, the Therapeutics of the invention are administered in combination with members of the TNF family. TNF, TNF-related or TNF-like molecules that may be administered with the Therapeutics of the invention include, but are not limited to, soluble forms of TNF-alpha, lymphotoxin-alpha (LT-alpha, also known as TNF-beta), LT-beta (found in complex heterotrimer LT-alpha2-beta), OPGL, FasL, CD27L, CD30L, CD40L, 4-1BBL, DcR3, OX40L, TNF-gamma (International Publication No. WO 96/14328), AIM-I (International Publication No. WO 97/33899), endokine-alpha (International Publication No. WO 98/07880), OPG, and neutrokine-alpha (International Publication No. WO 98/18921, OX40, and nerve growth factor (NGF), and soluble forms of Fas, CD30, CD27, CD40 and 4-IBB, TR2 (International Publication No. WO 96/34095), DR3 (International Publication No. WO 97/33904), DR4 (International Publication No. WO 98/32856), TR5 (International Publication No. WO 98/30693), TRANK, TR9 (International Publication No. WO 98/56892),TR10 (International Publication No. WO 98/54202), 312C2 (International Publication No. WO 98/06842), and TR12, and soluble forms CD154, CD70, and CD153.

[1043] In an additional embodiment, the Therapeutics of the invention are administered in combination with angiogenic proteins. Angiogenic proteins that may be administered with the Therapeutics of the invention include, but are not limited to, Glioma Derived Growth Factor (GDGF), as disclosed in European Patent Number EP-399816; Platelet Derived Growth Factor-A (PDGF-A); as disclosed in European Patent Number EP-6821 10; Platelet Derived Growth Factor-B (PDGF-B), as disclosed in European Patent Number EP-282317; Placental Growth Factor (PIGF), as disclosed in International Publication Number WO 92/06194; Placental Growth Factor-2 (PIGF-2), as disclosed in Hauser et al., Growth Factors, 4:259-268 (1993); Vascular Endothelial Growth Factor (VEGF), as disclosed in International Publication Number WO 90/13649; Vascular Endothelial Growth Factor-A (VEGF-A), as disclosed in European Patent Number EP-506477; Vascular Endothelial Growth Factor-2 (VEGF-2), as disclosed in International Publication Number WO 96/39515; Vascular Endothelial Growth Factor B (VEGF-3); Vascular Endothelial Growth Factor B-1 86 (VEGF-B186), as disclosed in International Publication Number WO 96/26736; Vascular Endothelial Growth Factor-D (VEGF-D), as disclosed in International Publication Number WO 98/02543; Vascular Endothelial Growth Factor-D (VEGF-D), as disclosed in International Publication Number WO 98/07832; and Vascular Endothelial Growth Factor-E (VEGF-E), as disclosed in German Patent Number DE19639601. The above mentioned references are herein incorporated by reference in their entireties.

[1044] In an additional embodiment, the Therapeutics of the invention are administered in combination with Fibroblast Growth Factors. Fibroblast Growth Factors that may be administered with the Therapeutics of the invention include, but are not limited to, FGF-1, FGF-2, FGF-3, FGF-4, FGF-5, FGF-6, FGF-7, FGF-8, FGF-9, FGF-10, FGF-11, FGF-12, FGF-13, FGF-14, and FGF-15.

[1045] In an additional embodiment, the Therapeutics of the invention are administered in combination with hematopoietic growth factors. Hematopoietic growth factors that may be administered with the Therapeutics of the invention include, but are not limited to, granulocyte macrophage colony stimulating factor (GM-CSF) (sargramostim, LEUKINE™, PROKINETM), granulocyte colony stimulating factor (G-CSF) (filgrastim, NEUPOGEN™), macrophage colony stimulating factor (M-CSF, CSF-1) erythropoietin (epoetin alfa, EPOGEN™, PROCRIT™), stem cell factor (SCF, c-kit ligand, steel factor), megakaryocyte colony stimulating factor, PIXY321 (a GMCSF/IL-3 fusion protein), interleukins, especially any one or more of IL-1 through IL-1 2, interferon-gamma, or thrombopoietin.

[1046] In certain embodiments, Therapeutics of the present invention are administered in combination with adrenergic blockers, such as, for example, acebutolol, atenolol, betaxolol, bisoprolol, carteolol, labetalol, metoprolol, nadolol, oxprenolol, penbutolol, pindolol, propranolol, sotalol, and timolol.

[1047] In another embodiment, the Therapeutics of the invention are administered in combination with an antiarrhythmic drug (e.g., adenosine, amidoarone, bretylium, digitalis, digoxin, digitoxin, diliazem, disopyramide, esmolol, flecainide, lidocaine, mexiletine, moricizine, phenytoin, procainamide, N-acetyl procainamide, propafenone, propranolol, quinidine, sotalol, tocainide, and verapamil).

[1048] In another embodiment, the Therapeutics of the invention are administered in combination with diuretic agents, such as carbonic anhydrase-inhibiting agents (e.g., acetazolamide, dichlorphenamide, and methazolamide), osmotic diuretics (e.g., glycerin, isosorbide, mannitol, and urea), diuretics that inhibit Na⁺-K⁺-2Cl⁻ symport (e.g., furosemide, bumetanide, azosemide, piretanide, tripamide, ethacrynic acid, muzolimine, and torsemide), thiazide and thiazide-like diuretics (e.g., bendroflumethiazide, benzthiazide, chlorothiazide, hydrochlorothiazide, hydroflumethiazide, methyclothiazide, polythiazide, trichormethiazide, chlorthalidone, indapamide, metolazone, and quinethazone), potassium sparing diuretics (e.g., amiloride and triamterene), and mineralcorticoid receptor antagonists (e.g., spironolactone, canrenone, and potassium canrenoate).

[1049] In one embodiment, the Therapeutics of the invention are administered in combination with treatments for endocrine and/or hormone imbalance disorders. Treatments for endocrine and/or hormone imbalance disorders include, but are not limited to, ¹²⁷I, radioactive isotopes of iodine such as ¹³¹ I and ¹²³I; recombinant growth hormone, such as HUMATROPE™ (recombinant somatropin); growth hormone analogs such as PROTROPIN™ (somatrem); dopamine agonists such as PARLODEL™ (bromocriptine); somatostatin analogs such as SANDOSTATIN™ (octreotide); gonadotropin preparations such as PREGNYL™, A.P.L.™ and PROFASI™ (chorionic gonadotropin (CG)), PERGONAL™ (menotropins), and METRODIN™ (urofollitropin (uFSH)); synthetic human gonadotropin releasing hormone preparations such as FACTREL™ and LUTREPULSE™ (gonadorelin hydrochloride); synthetic gonadotropin agonists such as LUPRON™ (leuprolide acetate), SUPPRELIN™ (histrelin acetate), SYNAREL™ (nafarelin acetate), and ZOLADEX™ (goserelin acetate); synthetic preparations of thyrotropin-releasing hormone such as RELEFACT TRH™ and THYPINONE™ (protirelin); recombinant human TSH such as THYROGEN™; synthetic preparations of the sodium salts of the natural isomers of thyroid hormones such as L-T₄™, SYNTHROID™ and LEVOTHROID™ (levothyroxine sodium), L-T₃™, CYTOMEL™ and TRIOSTAT™ (liothyroine sodium), and THYROLAR™ (liotrix); antithyroid compounds such as 6-n-propylthiouracil (propylthiouracil), 1-methyl-2-mercaptoimidazole and TAPAZOLE™ (methimazole), NEO-MERCAZOLE™ (carbimazole); beta-adrenergic receptor antagonists such as propranolol and esmolol; Ca²⁺ channel blockers; dexamethasone and iodinated radiological contrast agents such as TELEPAQUE™ (iopanoic acid) and ORAGRAFIN™ (sodium ipodate); estrogens or congugated estrogens such as ESTRACE™ (estradiol), ESTINYL™ (ethinyl estradiol), PREMARIN™, ESTRATAB™, ORTHO-EST™, OGEN™ and estropipate (estrone), ESTROVIS™ (quinestrol), ESTRADERM™ (estradiol), DELESTROGEN™ and VALERGEN™ (estradiol valerate), DEPO-ESTRADIOL CYPIONATE™ and ESTROJECT LA™ (estradiol cypionate); antiestrogens such as NOLVADEX™ (tamoxifen), SEROPHENE™ and CLOMID™ (clomiphene); progestins such as DURALUTIN™ (hydroxyprogesterone caproate), MPA™ and DEPO-PROVERA™ (medroxyprogesterone acetate), PROVERA™ and CYCRIN™ (MPA), MEGACE™ (megestrol acetate), NORLUTIN™ (norethindrone), and NORLUTATE™ and AYGESTIN™ (norethindrone acetate); progesterone implants such as NORPLANT SYSTEM™ (subdermal implants of norgestrel); antiprogestins such as RU 486™ (mifepristone); hormonal contraceptives such as ENOVID™ (norethynodrel plus mestranol), PROGESTASERT™ (intrauterine device that releases progesterone), LOESTRIN™, BREVICON™, MODICON™, GENORA™, NELONA™, NORINYL™, OVACON-35™and OVACON-50™ (ethinyl estradiol/norethindrone), LEVLEN™, NORDETTE™, TRI-LEVLEN™ and TRIPHASIL-21™(ethinyl estradiol/levonorgestrel) LO/OVRAL™ and OVRAL™ (ethinyl estradiol/norgestrel), DEMULEN™ (ethinyl estradiol/ethynodiol diacetate), NORINYL , ORTHO-NOVUM™, NORETHIN™, GENORA™, and NELOVA™ (norethindrone/mestranol), DESOGEN™ and ORTHO-CEPT™ (ethinyl estradiol/desogestrel), ORTHO-CYCLEN™ and ORTHO-TRICYCLEN™ (ethinyl estradiol/norgestimate), MICRONOR™ and NOR-QD™ (norethindrone), and OVRETTE™ (norgestrel); testosterone esters such as methenolone acetate and testosterone undecanoate; parenteral and oral androgens such as TESTOJECT-50™ (testosterone), TESTEX™ (testosterone propionate), DELATESTRYL™ (testosterone enanthate), DEPO-TESTOSTERONE™ (testosterone cypionate), DANOCRINE™ (danazol), HALOTESTIN™ (fluoxymesterone), ORETON METHYL™, TESTRED™ and VIRILON™ (methyltestosterone), and OXANDRIN™ (oxandrolone); testosterone transdermal systems such as TESTODERM™; androgen receptor antagonist and 5-alpha-reductase inhibitors such as ANDROCUR™ (cyproterone acetate), EULEXIN™ (flutamide), and PROSCAR™ (finasteride); adrenocorticotropic hormone preparations such as CORTROSYN™ (cosyntropin); adrenocortical steroids and their synthetic analogs such as ACLOVATE™ (alclometasone dipropionate), CYCLOCORT™ (amcinonide), BECLOVENT™ and VANCERIL™ (beclomethasone dipropionate), CELESTONE™ (betamethasone), BENISONE™ and UTICORT™ (betamethasone benzoate), DIPROSONE™ (betamethasone dipropionate), CELESTONE PHOSPHATE™ (betamethasone sodium phosphate), CELESTONE SOLUSPAN™ (betamethasone sodium phosphate and acetate), BETA-VAL™ and VALISONE™ (betamethasone valerate), TEMOVATE™ (clobetasol propionate), CLODERM™ (clocortolone pivalate), CORTEF™ and HYDROCORTONE™ (cortisol (hydrocortisone)), HYDROCORTONE ACETATE™ (cortisol (hydrocortisone) acetate), LOCOID™ (cortisol (hydrocortisone) butyrate), HYDROCORTONE PHOSPHATE™ (cortisol (hydrocortisone) sodium phosphate), A-HYDROCORT™ and SOLU CORTEF™ (cortisol (hydrocortisone) sodium succinate), WESTCORT™ (cortisol (hydrocortisone) valerate), CORTISONE ACETATE™ (cortisone acetate), DESOWEN™ and TRIDESILON™ (desonide), TOPICORT™ (desoximetasone), DECADRON™ (dexamethasone), DECADRON LA™ (dexamethasone acetate), DECADRON PHOSPHATE™ and HEXADROL PHOSPHATE™ (dexamethasone sodium phosphate), FLORONE™ and MAXIFLOR™ (diflorasone diacetate), FLORINEF ACETATE™ (fludrocortisone acetate), AEROBID™ and NASALIDE™ (flunisolide), FLUONID™ and SYNALAR™ (fluocinolone acetonide), LIDEX™ (fluocinonide), FLUOR-OP™ and FML™ (fluorometholone), CORDRAN™ (flurandrenolide), HALOG™ (halcinonide), HMS LIZUIFILM™ (medrysone), MEDROL™ (methylprednisolone), DEPO-MEDROL™ and MEDROL ACETATE™ (methylprednisone acetate), A-METHAPRED™ and SOLUMEDROL™ (methylprednisolone sodium succinate), ELOCON™ (mometasone furoate), HALDRONE™ (paramethasone acetate), DELTA-CORTEF™ (prednisolone), ECONOPRED™ (prednisolone acetate), HYDELTRASOL™ (prednisolone sodium phosphate), HYDELTRA-T.B.A™ (prednisolone tebutate), DELTASONE™ (prednisone), ARISTOCORT™ and KENACORT™ (triamcinolone), KENALOG™ (triamcinolone acetonide), ARISTOCORT™ and KENACORT DIACETATE™ (triamcinolone diacetate), and ARISTOSPAN™ (triamcinolone hexacetonide); inhibitors of biosynthesis and action of adrenocortical steroids such as CYTADREN™ (aminoglutethimide), NIZORAL™ (ketoconazole), MODRASTANE™ (trilostane), and METOPIRONE™ (metyrapone); bovine, porcine or human insulin or mixtures thereof; insulin analogs; recombinant human insulin such as HUMULIN™ and NOVOLIN™; oral hypoglycemic agents such as ORAMIDE™ and ORINASE™ (tolbutamide), DIABINESE™ (chlorpropamide), TOLAMIDE™ and TOLINASE™ (tolazamide), DYMELOR™ (acetohexamide), glibenclamide, MICRONASE™, DIBETA™ and GLYNASE™ (glyburide), GLUCOTROL™ (glipizide), and DIAMICRON™ (gliclazide), GLUCOPHAGE™ (metformin), ciglitazone, pioglitazone, and alpha-glucosidase inhibitors; bovine or porcine glucagon; somatostatins such as SANDOSTATIN™ (octreotide); and diazoxides such as PROGLYCEM™ (diazoxide).

[1050] In one embodiment, the Therapeutics of the invention are administered in combination with treatments for uterine motility disorders. Treatments for uterine motility disorders include, but are not limited to, estrogen drugs such as conjugated estrogens (e.g., PREMARIN® and ESTRATAB®), estradiols (e.g., CLIMARA® and ALORA®), estropipate, and chlorotrianisene; progestin drugs (e.g., AMEN® (medroxyprogesterone), MICRONOR® (norethidrone acetate), PROMETRIUM® progesterone, and megestrol acetate); and estrogen/progesterone combination therapies such as, for example, conjugated estrogens/medroxyprogesterone (e.g., PREMPRO® and PREMPHASE®) and norethindrone acetate/ethinyl estsradiol (e.g., FEMHRT®).

[1051] In an additional embodiment, the Therapeutics of the invention are administered in combination with drugs effective in treating iron deficiency and hypochromic anemias, including but not limited to, ferrous sulfate (iron sulfate, FEOSOL™), ferrous fumarate (e.g., FEOSTAT™), ferrous gluconate (e.g., FERGON™), polysaccharide-iron complex (e.g., NIFEREX™), iron dextran injection (e.g., INFED™), cupric sulfate, pyroxidine, riboflavin, Vitamin B₁₂, cyancobalamin injection (e.g., REDISOL™, RUBRAMIN PC™), hydroxocobalamin, folic acid (e.g., FOLVITE™), leucovorin (folinic acid, 5-CHOH4PteGlu, citrovorum factor) or WELLCOVORIN (Calcium salt of leucovorin), transferrin or ferritin.

[1052] In certain embodiments, the Therapeutics of the invention are administered in combination with agents used to treat psychiatric disorders. Psychiatric drugs that may be administered with the Therapeutics of the invention include, but are not limited to, antipsychotic agents (e.g., chlorpromazine, chlorprothixene, clozapine, fluphenazine, haloperidol, loxapine, mesoridazine, molindone, olanzapine, perphenazine, pimozide, quetiapine, risperidone, thioridazine, thiothixene, trifluoperazine, and triflupromazine), antimanic agents (e.g., carbamazepine, divalproex sodium, lithium carbonate, and lithium citrate), antidepressants (e.g., amitriptyline, amoxapine, bupropion, citalopram, clomipramine, desipramine, doxepin, fluvoxamine, fluoxetine, imipramine, isocarboxazid, maprotiline, mirtazapine, nefazodone, nortriptyline, paroxetine, phenelzine, protriptyline, sertraline, tranylcypromine, trazodone, trimipramine, and venlafaxine), antianxiety agents (e.g., alprazolam, buspirone, chlordiazepoxide, clorazepate, diazepam, halazepam, lorazepam, oxazepam, and prazepam), and stimulants (e.g., d-amphetamine, methylphenidate, and pemoline).

[1053] In other embodiments, the Therapeutics of the invention are administered in combination with agents used to treat neurological disorders. Neurological agents that may be administered with the Therapeutics of the invention include, but are not limited to, antiepileptic agents (e.g., carbamazepine, clonazepam, ethosuximide, phenobarbital, phenytoin, primidone, valproic acid, divalproex sodium, felbamate, gabapentin, lamotrigine, levetiracetam, oxcarbazepine, tiagabine, topiramate, zonisamide, diazepam, lorazepam, and clonazepam), antiparkinsonian agents (e.g., levodopa/carbidopa, selegiline, amantidine, bromocriptine, pergolide, ropinirole, pramipexole, benztropine; biperiden; ethopropazine; procyclidine; trihexyphenidyl, tolcapone), and ALS therapeutics (e.g. riluzole).

[1054] In another embodiment, Therapeutics of the invention are administered in combination with vasodilating agents and/or calcium channel blocking agents. Vasodilating agents that may be administered with the Therapeutics of the invention include, but are not limited to, Angiotensin Converting Enzyme (ACE) inhibitors (e.g., papaverine, isoxsuprine, benazepril, captopril, cilazapril, enalapril, enalaprilat, fosinopril, lisinopril, moexipril, perindopril, quinapril, ramipril, spirapril, trandolapril, and nylidrin), and nitrates (e.g., isosorbide dinitrate, isosorbide mononitrate, and nitroglycerin). Examples of calcium channel blocking agents that may be administered in combination with the Therapeutics of the invention include, but are not limited to amlodipine, bepridil, diltiazem, felodipine, flunarizine, isradipine, nicardipine, nifedipine, nimodipine, and verapamil.

[1055] In additional embodiments, the Therapeutics of the invention are administered in combination with other therapeutic or prophylactic regimens, such as, for example, radiation therapy.

### Example 14

### Method of Treating Decreased Levels of the Polypeptide

[1056] The present invention relates to a method for treating an individual in need of an increased level of a polypeptide of the invention in the body comprising administering to such an individual a composition comprising a therapeutically effective amount of an agonist of the invention (including polypeptides of the invention). Moreover, it will be appreciated that conditions caused by a decrease in the standard or normal expression level of a polypeptide of the present invention in an individual can be treated by administering the agonist or antagonist of the present invention. Thus, the invention also provides a method of treatment of an individual in need of an increased level of the polypeptide comprising administering to such an individual a Therapeutic comprising an amount of the agonist or antagonist to increase the activity level of the polypeptide in such an individual.

[1057] For example, a patient with decreased levels of a polypeptide receives a daily dose 0.1-100 ug/kg of the agonist or antagonist for six consecutive days. The exact details of the dosing scheme, based on administration and formulation, are provided in Example 13.

### Example 15

### Method of Treating Increased Levels of the Polypeptide

[1058] The present invention also relates to a method of treating an individual in need of a decreased level of a polypeptide of the invention in the body comprising administering to such an individual a composition comprising a therapeutically effective amount of an antagonist of the invention (including polypeptides and antibodies of the invention).

[1059] In one example, antisense technology is used to inhibit production of a polypeptide of the present invention. This technology is one example of a method of decreasing levels of a polypeptide, due to a variety of etiologies, such as cancer.

[1060] For example, a patient diagnosed with abnormally increased levels of a polypeptide is administered intravenously antisense polynucleotides at 0.5, 1.0, 1.5, 2.0 and 3.0 mg/kg day for 21 days. This treatment is repeated after a 7-day rest period if the treatment was well tolerated. The formulation of the antisense polynucleotide is provided in Example 13.

### Example 16

### Method of Treatment Using Gene Therapy—ex vivo

[1061] One method of gene therapy transplants fibroblasts, which are capable of expressing a polypeptide, onto a patient. Generally, fibroblasts are obtained from a subject by skin biopsy. The resulting tissue is placed in tissue-culture medium and separated into small pieces. Small chunks of the tissue are placed on a wet surface of a tissue culture flask, approximately ten pieces are placed in each flask. The flask is turned upside down, closed tight and left at room temperature over night. After 24 hours at room temperature, the flask is inverted and the chunks of tissue remain fixed to the bottom of the flask and fresh media (e.g., Ham's F12 media, with 10% FBS, penicillin and streptomycin) is added. The flasks are then incubated at 37 degree C. for approximately one week.

[1062] At this time, fresh media is added and subsequently changed every several days. After an additional two weeks in culture, a monolayer of fibroblasts emerge. The monolayer is trypsinized and scaled into larger flasks.

[1063] pMV-7 (Kirschmeier, P. T. et al., DNA, 7:219-25 (1988)), flanked by the long terminal repeats of the Moloney murine sarcoma virus, is digested with EcoRI and HindIII and subsequently treated with calf intestinal phosphatase. The linear vector is fractionated on agarose gel and purified, using glass beads.

[1064] The cDNA encoding a polypeptide of the present invention can be amplified using PCR primers which correspond to the 5′ and 3′ end sequences respectively as set forth in Example 1 using primers and having appropriate restriction sites and initiation/stop codons, if necessary. Preferably, the 5′ primer contains an EcoRI site and the 3′ primer includes a HindIII site. Equal quantities of the Moloney murine sarcoma virus linear backbone and the amplified EcoRI and HindIII fragment are added together, in the presence of T4 DNA ligase. The resulting mixture is maintained under conditions appropriate for ligation of the two fragments. The ligation mixture is then used to transform bacteria HB101, which are then plated onto agar containing kanamycin for the purpose of confirming that the vector has the gene of interest properly inserted.

[1065] The amphotropic pA317 or GP+am12 packaging cells are grown in tissue culture to confluent density in Dulbecco's Modified Eagles Medium (DMEM) with 10% calf serum (CS), penicillin and streptomycin. The MSV vector containing the gene is then added to the media and the packaging cells transduced with the vector. The packaging cells now produce infectious viral particles containing the gene (the packaging cells are now referred to as producer cells).

[1066] Fresh media is added to the transduced producer cells, and subsequently, the media is harvested from a 10 cm plate of confluent producer cells. The spent media, containing the infectious viral particles, is filtered through a millipore filter to remove detached producer cells and this media is then used to infect fibroblast cells. Media is removed from a sub-confluent plate of fibroblasts and quickly replaced with the media from the producer cells. This media is removed and replaced with fresh media. If the titer of virus is high, then virtually all fibroblasts will be infected and no selection is required. If the titer is very low, then it is necessary to use a retroviral vector that has a selectable marker, such as neo or his. Once the fibroblasts have been efficiently infected, the fibroblasts are analyzed to determine whether protein is produced.

[1067] The engineered fibroblasts are then transplanted onto the host, either alone or after having been grown to confluence on cytodex 3 microcarrier beads.

### Example 17

### Gene Therapy Using Endogenous Genes Corresponding to Polynucleotides of the Invention

[1068] Another method of gene therapy according to the present invention involves operably associating the endogenous polynucleotide sequence of the invention with a promoter via homologous recombination as described, for example, in U.S. Pat. No. 5,641,670, issued Jun. 24, 1997; International Publication NO: WO 96/29411, published Sep. 26, 1996; International Publication NO: WO 94/12650, published Aug. 4, 1994; Koller et al., Proc. Natl. Acad. Sci. USA, 86:8932-8935 (1989); and Zijlstra et al., Nature, 342:435-438 (1989). This method involves the activation of a gene which is present in the target cells, but which is not expressed in the cells, or is expressed at a lower level than desired.

[1069] Polynucleotide constructs are made which contain a promoter and targeting sequences, which are homologous to the 5′ non-coding sequence of endogenous polynucleotide sequence, flanking the promoter. The targeting sequence will be sufficiently near the 5′ end of the polynucleotide sequence so the promoter will be operably linked to the endogenous sequence upon homologous recombination. The promoter and the targeting sequences can be amplified using PCR. Preferably, the amplified promoter contains distinct restriction enzyme sites on the 5′ and 3′ ends. Preferably, the 3′ end of the first targeting sequence contains the same restriction enzyme site as the 5′ end of the amplified promoter and the 5′ end of the second targeting sequence contains the same restriction site as the 3′ end of the amplified promoter.

[1070] The amplified promoter and the amplified targeting sequences are digested with the appropriate restriction enzymes and subsequently treated with calf intestinal phosphatase. The digested promoter and digested targeting sequences are added together in the presence of T4 DNA ligase. The resulting mixture is maintained under conditions appropriate for ligation of the two fragments. The construct is size fractionated on an agarose gel, then purified by phenol extraction and ethanol precipitation.

[1071] In this Example, the polynucleotide constructs are administered as naked polynucleotides via electroporation. However, the polynucleotide constructs may also be administered with transfection-facilitating agents, such as liposomes, viral sequences, viral particles, precipitating agents, etc. Such methods of delivery are known in the art.

[1072] Once the cells are transfected, homologous recombination will take place which results in the promoter being operably linked to the endogenous polynucleotide sequence. This results in the expression of polynucleotide corresponding to the polynucleotide in the cell. Expression may be detected by immunological staining, or any other method known in the art.

[1073] Fibroblasts are obtained from a subject by skin biopsy. The resulting tissue is placed in DMEM +10% fetal calf serum. Exponentially growing or early stationary phase fibroblasts are trypsinized and rinsed from the plastic surface with nutrient medium. An aliquot of the cell suspension is removed for counting, and the remaining cells are subjected to centrifugation. The supernatant is aspirated and the pellet is resuspended in 5 ml of electroporation buffer (20 mM HEPES pH 7.3, 137 mM NaCl, 5 mM KCl, 0.7 mM Na₂ HPO₄, 6 mM dextrose). The cells are recentrifuged, the supernatant aspirated, and the cells resuspended in electroporation buffer containing 1 mg/ml acetylated bovine serum albumin. The final cell suspension contains approximately 3×10⁶ cells/ml. Electroporation should be performed immediately following resuspension.

[1074] Plasmid DNA is prepared according to standard techniques. For example, to construct a plasmid for targeting to the locus corresponding to the polynucleotide of the invention, plasmid pUC18 (MBI Fermentas, Amherst, N.Y.) is digested with HindIII. The CMV promoter is amplified by PCR with an XbaI site on the 5′ end and a BamHI site on the 3′ end. Two non-coding sequences are amplified via PCR: one non-coding sequence (fragment 1) is amplified with a HindIII site at the 5′ end and an Xba site at the 3′end; the other non-coding sequence (fragment 2) is amplified with a BamHI site at the Send and a HindIII site at the 3′end. The CMV promoter and the fragments (1 and 2) are digested with the appropriate enzymes (CMV promoter—XbaI and BamHI; fragment 1—XbaI; fragment 2—BamHI) and ligated together. The resulting ligation product is digested with HindIII, and ligated with the HindIII-digested pUC 18 plasmid.

[1075] Plasmid DNA is added to a sterile cuvette with a 0.4 cm electrode gap (Bio-Rad). The final DNA concentration is generally at least 120 μg/ml. 0.5 ml of the cell suspension (containing approximately 1.5×10⁶ cells) is then added to the cuvette, and the cell suspension and DNA solutions are gently mixed. Electroporation is performed with a Gene-Pulser apparatus (Bio-Rad). Capacitance and voltage are set at 960 μF. and 250-300 V, respectively. As voltage increases, cell survival decreases, but the percentage of surviving cells that stably incorporate the introduced DNA into their genome increases dramatically. Given these parameters, a pulse time of approximately 14-20 mSec should be observed.

[1076] Electroporated cells are maintained at room temperature for approximately 5 min, and the contents of the cuvette are then gently removed with a sterile transfer pipette. The cells are added directly to 10 ml of prewarmed nutrient media (DMEM with 15% calf serum) in a 10 cm dish and incubated at 37 degree C. The following day, the media is aspirated and replaced with 10 ml of fresh media and incubated for a further 16-24 hours.

[1077] The engineered fibroblasts are then injected into the host, either alone or after having been grown to confluence on cytodex 3 microcarrier beads. The fibroblasts now produce the protein product. The fibroblasts can then be introduced into a patient as described above.

### Example 18

### Method of Treatment Using Gene Therapy—in vivo

[1078] Another aspect of the present invention is using in vivo gene therapy methods to treat disorders, diseases and conditions. The gene therapy method relates to the introduction of naked nucleic acid (DNA, RNA, and antisense DNA or RNA) sequences into an animal to increase or decrease the expression of the polypeptide. The polynucleotide of the present invention may be operatively linked to (i.e., associated with) a promoter or any other genetic elements necessary for the expression of the polypeptide by the target tissue. Such gene therapy and delivery techniques and methods are known in the art, see, for example, WO90/11092, WO98/11779; U.S. Pat. No. 5,693,622, 5,705,151, 5,580,859; Tabata et al., Cardiovasc. Res. 35(3):470-479 (1997); Chao et al., Pharmacol. Res. 35(6):517-522 (1997); Wolff, Neuromuscul. Disord. 7(5):314-318 (1997); Schwartz et al., Gene Ther. 3(5):405-411 (1996); Tsurumi et al., Circulation 94(12):3281-3290 (1996) (incorporated herein by reference).

[1079] The polynucleotide constructs may be delivered by any method that delivers injectable materials to the cells of an animal, such as, injection into the interstitial space of tissues (heart, muscle, skin, lung, liver, intestine and the like). The polynucleotide constructs can be delivered in a pharmaceutically acceptable liquid or aqueous carrier.

[1080] The term “naked” polynucleotide, DNA or RNA, refers to sequences that are free from any delivery vehicle that acts to assist, promote, or facilitate entry into the cell, including viral sequences, viral particles, liposome formulations, lipofectin or precipitating agents and the like. However, the polynucleotides of the present invention may also be delivered in liposome formulations (such as those taught in Felgner P. L. et al. (1995) Ann. NY Acad. Sci. 772:126-139 and Abdallah B. et al.

[1081] Biol. Cell 85(1):1-7) which can be prepared by methods well known to those skilled in the art.

[1082] The polynucleotide vector constructs used in the gene therapy method are preferably constructs that will not integrate into the host genome nor will they contain sequences that allow for replication. Any strong promoter known to those skilled in the art can be used for driving the expression of DNA. Unlike other gene therapy techniques, one major advantage of introducing naked nucleic acid sequences into target cells is the transitory nature of the polynucleotide synthesis in the cells. Studies have shown that non-replicating DNA sequences can be introduced into cells to provide production of the desired polypeptide for periods of up to six months.

[1083] The polynucleotide construct can be delivered to the interstitial space of tissues within an animal, including muscle, skin, brain, lung, liver, spleen, bone marrow, thymus, heart, lymph, blood, bone, cartilage, pancreas, kidney, gall bladder, stomach, intestine, testis, ovary, uterus, rectum, nervous system, eye, gland, and connective tissue. Interstitial space of the tissues comprises the intercellular fluid, mucopolysaccharide matrix among the reticular fibers of organ tissues, elastic fibers in the walls of vessels or chambers, collagen fibers of fibrous tissues, or that same matrix within connective tissue ensheathing muscle cells or in the lacunae of bone. It is similarly the space occupied by the plasma of the circulation and the lymph fluid of the lymphatic channels. Delivery to the interstitial space of muscle tissue is preferred for the reasons discussed below. They may be conveniently delivered by injection into the tissues comprising these cells. They are preferably delivered to and expressed in persistent, non-dividing cells which are differentiated, although delivery and expression may be, achieved in non-differentiated or less completely differentiated cells, such as, for example, stem cells of blood or skin fibroblasts. In vivo muscle cells are particularly competent in their ability to take up and express polynucleotides.

[1084] For the naked polynucleotide injection, an effective dosage amount of DNA or RNA will be in the range of from about 0.05 g/kg body weight to about 50 mg/kg body weight. Preferably the dosage will be from about 0.005 mg/kg to about 20 mg/kg and more preferably from about 0.05 mg/kg to about 5 mg/kg. Of course, as the artisan of ordinary skill will appreciate, this dosage will vary according to the tissue site of injection. The appropriate and effective dosage of nucleic acid sequence can readily be determined by those of ordinary skill in the art and may depend on the condition being treated and the route of administration. The preferred route of administration is by the parenteral route of injection into the interstitial space of tissues. However, other parenteral routes may also be used, such as, inhalation of an aerosol formulation particularly for delivery to lungs or bronchial tissues, throat or mucous membranes of the nose. In addition, naked polynucleotide constructs can be delivered to arteries during angioplasty by the catheter used in the procedure.

[1085] The dose response effects of injected polynucleotide in muscle in vivo is determined as follows. Suitable template DNA for production of mRNA coding for polypeptide of the present invention is prepared in accordance with a standard recombinant DNA methodology. The template DNA, which may be either circular or linear, is either used as naked DNA or complexed with liposomes. The quadriceps muscles of mice are then injected with various amounts of the template DNA.

[1086] Five to six week old female and male Balb/C mice are anesthetized by intraperitoneal injection with 0.3 ml of 2.5% Avertin. A 1.5 cm incision is made on the anterior thigh, and the quadriceps muscle is directly visualized. The template DNA is injected in 0.1 ml of carrier in a 1 cc syringe through a 27 gauge needle over one minute, approximately 0.5 cm from the distal insertion site of the muscle into the knee and about 0.2 cm deep. A suture is placed over the injection site for future localization, and the skin is closed with stainless steel clips.

[1087] After an appropriate incubation time (e.g., 7 days) muscle extracts are prepared by excising the entire quadriceps. Every fifth 15 um cross-section of the individual quadriceps muscles is histochemically stained for protein expression. A time course for protein expression may be done in a similar fashion except that quadriceps from different mice are harvested at different times. Persistence of DNA in muscle following injection may be determined by Southern blot analysis after preparing total cellular DNA and HIRT supernatants from injected and control mice. The results of the above experimentation in mice can be used to extrapolate proper dosages and other treatment parameters in humans and other animals using naked DNA.

### Example 19

### Transgenic Animals

[1088] The polypeptides of the invention can also be expressed in transgenic animals. Animals of any species, including, but not limited to, mice, rats, rabbits, hamsters, guinea pigs, pigs, micro-pigs, goats, sheep, cows and non-human primates, e.g., baboons, monkeys, and chimpanzees may be used to generate transgenic animals. In a specific embodiment, techniques described herein or otherwise known in the art, are used to express polypeptides of the invention in humans, as part of a gene therapy protocol.

[1089] Any technique known in the art may be used to introduce the transgene (i.e., polynucleotides of the invention) into animals to produce the founder lines of transgenic animals. Such techniques include, but are not limited to, pronuclear microinjection (Paterson et al., Appl. Microbiol. Biotechnol. 40:691-698 (1994); Carver et al., Biotechnology (NY) 11:1263-1270 (1993); Wright et al., Biotechnology (NY) 9:830-834 (1991); and Hoppe et al., U.S. Pat. No. 4,873,191 (1989)); retrovirus mediated gene transfer into germ lines (Van der Putten et al., Proc. Natl. Acad. Sci., USA 82:6148-6152 (1985)), blastocysts or embryos; gene targeting in embryonic stem cells (Thompson et al., Cell 56:313-321 (1989)); electroporation of cells or embryos (Lo, 1983, Mol Cell. Biol. 3:1803-1814 (1983)); introduction of the polynucleotides of the invention using a gene gun (see, e.g., Ulmer et al., Science 259:1745 (1993); introducing nucleic acid constructs into embryonic pleuripotent stem cells and transferring the stem cells back into the blastocyst; and sperm-mediated gene transfer (Lavitrano et al., Cell 57:717-723 (1989); etc. For a review of such techniques, see Gordon, “Transgenic Animals,” Intl. Rev. Cytol. 115:171-229 (1989), which is incorporated by reference herein in its entirety.

[1090] Any technique known in the art may be used to produce transgenic clones containing polynucleotides of the invention, for example, nuclear transfer into enucleated oocytes of nuclei from cultured embryonic, fetal, or adult cells induced to quiescence (Campell et al., Nature 380:64-66 (1996); Wilmut et al., Nature 385:810-813 (1997)).

[1091] The present invention provides for transgenic animals that carry the transgene in all their cells, as well as animals which carry the transgene in some, but not all their cells, i.e., mosaic animals or chimeric. The transgene may be integrated as a single transgene or as multiple copies such as in concatamers, e.g., head-to-head tandems or head-to-tail tandems. The transgene may also be selectively introduced into and activated in a particular cell type by following, for example, the teaching of Lasko et al. (Lasko et al., Proc. Natl. Acad. Sci. USA 89:6232-6236 (1992)). The regulatory sequences required for such a cell-type specific activation will depend upon the particular cell type of interest, and will be apparent to those of skill in the art. When it is desired that the polynucleotide transgene be integrated into the chromosomal site of the endogenous gene, gene targeting is preferred. Briefly, when such a technique is to be utilized, vectors containing some nucleotide sequences homologous to the endogenous gene are designed for the purpose of integrating, via homologous recombination with chromosomal sequences, into and disrupting the function of the nucleotide sequence of the endogenous gene. The transgene may also be selectively introduced into a particular cell type, thus inactivating the endogenous gene in only that cell type, by following, for example, the teaching of Gu et al. (Gu et al., Science 265:103-106 (1994)). The regulatory sequences required for such a cell-type specific inactivation will depend upon the particular cell type of interest, and will be apparent to those of skill in the art.

[1092] Once transgenic animals have been generated, the expression of the recombinant gene may be assayed utilizing standard techniques. Initial screening may be accomplished by Southern blot analysis or PCR techniques to analyze animal tissues to verify that integration of the transgene has taken place. The level of mRNA expression of the transgene in the tissues of the transgenic animals may also be assessed using techniques which include, but are not limited to, Northern blot analysis of tissue samples obtained from the animal, in situ hybridization analysis, and reverse transcriptase-PCR (rt-PCR). Samples of transgenic gene-expressing tissue may also be evaluated immunocytochemically or immunohistochemically using antibodies specific for the transgene product.

[1093] Once the founder animals are produced, they may be bred, inbred, outbred, or crossbred to produce colonies of the particular animal. Examples of such breeding strategies include, but are not limited to: outbreeding of founder animals with more than one integration site in order to establish separate lines; inbreeding of separate lines in order to produce compound transgenics that express the transgene at higher levels because of the effects of additive expression of each transgene; crossing of heterozygous transgenic animals to produce animals homozygous for a given integration site in order to both augment expression and eliminate the need for screening of animals by DNA analysis; crossing of separate homozygous lines to produce compound heterozygous or homozygous lines; and breeding to place the transgene on a distinct background that is appropriate for an experimental model of interest.

[1094] Transgenic animals of the invention have uses which include, but are not limited to, animal model systems useful in elaborating the biological function of polypeptides of the present invention, studying conditions and/or disorders associated with aberrant expression, and in screening for compounds effective in ameliorating such conditions and/or disorders.

### Example 20

### Knock-Out Animals

[1095] Endogenous gene expression can also be reduced by inactivating or “knocking out” the gene and/or its promoter using targeted homologous recombination. (See e.g., Smithies et al., Nature 317:230-234 (1985); Thomas & Capecchi, Cell 51:503-512 (1987); Thompson et al., Cell 5:313-321 (1989); each of which is incorporated by reference herein in its entirety.) For example, a mutant, non-functional polynucleotide of the invention (or a completely unrelated DNA sequence) flanked by DNA homologous to the endogenous polynucleotide sequence (either the coding regions or regulatory regions of the gene) can be used, with or without a selectable marker and/or a negative selectable marker, to transfect cells that express polypeptides of the invention in vivo. In another embodiment, techniques known in the art are used to generate knockouts in cells that contain, but do not express the gene of interest. Insertion of the DNA construct, via targeted homologous recombination, results in inactivation of the targeted gene. Such approaches are particularly suited in research and agricultural fields where modifications to embryonic stem cells can be used to generate animal offspring with an inactive targeted gene (e.g., see Thomas & Capecchi 1987 and Thompson 1989, supra). However this approach can be routinely adapted for use in humans provided the recombinant DNA constructs are directly administered or targeted to the required site in vivo using appropriate viral vectors that will be apparent to those of skill in the art.

[1096] In further embodiments of the invention, cells that are genetically engineered to express the polypeptides of the invention, or alternatively, that are genetically engineered not to express the polypeptides of the invention (e.g., knockouts) are administered to a patient in vivo. Such cells may be obtained from the patient (i.e., animal, including human) or an MHC compatible donor and can include, but are not limited to fibroblasts, bone marrow cells, blood cells (e.g., lymphocytes), adipocytes, muscle cells, endothelial cells etc. The cells are genetically engineered in vitro using recombinant DNA techniques to introduce the coding sequence of polypeptides of the invention into the cells, or alternatively, to disrupt the coding sequence and/or endogenous regulatory sequence associated with the polypeptides of the invention, e.g., by transduction (using viral vectors, and preferably vectors that integrate the transgene into the cell genome) or transfection procedures, including, but not limited to, the use of plasmids, cosmids, YACs, naked DNA, electroporation, liposomes, etc. The coding sequence of the polypeptides of the invention can be placed under the control of a strong constitutive or inducible promoter or promoter/enhancer to achieve expression, and preferably secretion, of the polypeptides of the invention. The engineered cells which express and preferably secrete the polypeptides of the invention can be introduced into the patient systemically, e.g., in the circulation, or intraperitoneally.

[1097] Alternatively, the cells can be incorporated into a matrix and implanted in the body, e.g., genetically engineered fibroblasts can be implanted as part of a skin graft; genetically engineered endothelial cells can be implanted as part of a lymphatic or vascular graft. (See, for example, Anderson et al. U.S. Pat. No. 5,399,349; and Mulligan & Wilson, U.S. Pat. No. 5,460,959 each of which is incorporated by reference herein in its entirety).

[1098] When the cells to be administered are non-autologous or non-MHC compatible cells, they can be administered using well known techniques which prevent the development of a host immune response against the introduced cells. For example, the cells may be introduced in an encapsulated form which, while allowing for an exchange of components with the immediate extracellular environment, does not allow the introduced cells to be recognized by the host immune system.

[1099] Transgenic and “knock-out” animals of the invention have uses which include, but are not limited to, animal model systems useful in elaborating the biological function of polypeptides of the present invention, studying conditions and/or disorders associated with aberrant expression, and in screening for compounds effective in ameliorating such conditions and/or disorders.

### Example 21

### Assays Detecting Stimulation or Inhibition of B cell Proliferation and Differentiation

[1100] Generation of functional humoral immune responses requires both soluble and cognate signaling between B-lineage cells and their microenvironment. Signals may impart a positive stimulus that allows a B-lineage cell to continue its programmed development, or a negative stimulus that instructs the cell to arrest its current developmental pathway. To date, numerous stimulatory and inhibitory signals have been found to influence B cell responsiveness including IL-2, IL-4, IL-5, IL-6, IL-7, IL10, IL-13, IL-14 and IL-15. Interestingly, these signals are by themselves weak effectors but can, in combination with various co-stimulatory proteins, induce activation, proliferation, differentiation, homing, tolerance and death among B cell populations.

[1101] One of the best studied classes of B-cell co-stimulatory proteins is the TNF-superfamily. Within this family CD40, CD27, and CD30 along with their respective ligands CD154, CD70, and CD153 have been found to regulate a variety of immune responses. Assays which allow for the detection and/or observation of the proliferation and differentiation of these B-cell populations and their precursors are valuable tools in determining the effects various proteins may have on these B-cell populations in terms of proliferation and differentiation. Listed below are two assays designed to allow for the detection of the differentiation, proliferation, or inhibition of B-cell populations and their precursors.

[1102] In vitro Assay—Agonists or antagonists of the invention can be assessed for its ability to induce activation, proliferation, differentiation or inhibition and/or death in B-cell populations and their precursors. The activity of the agonists or antagonists of the invention on purified human tonsillar B cells, measured qualitatively over the dose range from 0.1 to 10,000 ng/mL, is assessed in a standard B-lymphocyte co-stimulation assay in which purified tonsillar B cells are cultured in the presence of either formalin-fixed Staphylococcus aureus Cowan I (SAC) or immobilized anti-human IgM antibody as the priming agent. Second signals such as IL-2 and IL-15 synergize with SAC and IgM crosslinking to elicit B cell proliferation as measured by tritiated-thymidine incorporation. Novel synergizing agents can be readily identified using this assay. The assay involves isolating human tonsillar B cells by magnetic bead (MACS) depletion of CD3-positive cells. The resulting cell population is greater than 95% B cells as assessed by expression of CD45R(B220).

[1103] Various dilutions of each sample are placed into individual wells of a 96-well plate to which are added 10⁵ B-cells suspended in culture medium (RPMI 1640 containing 10% FBS, 5×10⁻⁵M 2ME, 100U/ml penicillin, 10 ug/ml streptomycin, and 10⁻⁵ dilution of SAC) in a total volume of 150 ul. Proliferation or inhibition is quantitated by a 20h pulse (1 uCi/well) with 3H-thymidine (6.7 Ci/mM) beginning 72h post factor addition. The positive and negative controls are IL2 and medium respectively.

[1104] In vivo Assay—BALB/c mice are injected (i.p.) twice per day with buffer only, or 2 mg/Kg of agonists or antagonists of the invention, or truncated forms thereof. Mice receive this treatment for 4 consecutive days, at which time they are sacrificed and various tissues and serum collected for analyses. Comparison of H&E sections from normal spleens and spleens treated with agonists or antagonists of the invention identify the results of the activity of the agonists or antagonists on spleen cells, such as the diffusion of peri-arterial lymphatic sheaths, and/or significant increases in the nucleated cellularity of the red pulp regions, which may indicate the activation of the differentiation and proliferation of B-cell populations. Immunohistochemical studies using a B cell marker, anti-CD45R(B220), are used to determine whether any physiological changes to splenic cells, such as splenic disorganization, are due to increased B-cell representation within loosely defined B-cell zones that infiltrate established T-cell regions.

[1105] Flow cytometric analyses of the spleens from mice treated with agonist or antagonist is used to indicate whether the agonists or antagonists specifically increases the proportion of ThB+, CD45R(B220)dull B cells over that which is observed in control mice.

[1106] Likewise, a predicted consequence of increased mature B-cell representation in vivo is a relative increase in serum Ig titers. Accordingly, serum IgM and IgA levels are compared between buffer and agonists or antagonists-treated mice.

[1107] The studies described in this example tested activity of agonists or antagonists of the invention. However, one skilled in the art could easily modify the exemplified studies to test the activity of polynucleotides or polypeptides of the invention (e.g., gene therapy).

### Example 22

### T Cell Proliferation Assay

[1108] A CD3-induced proliferation assay is performed on PBMCs and is measured by the uptake of ³H-thymidine. The assay is performed as follows. Ninety-six well plates are coated with 100 μl/well of mAb to CD3 (HIT3a, Pharmingen) or isotype-matched control mAb (B33.1) overnight at 4 degrees C. (1 μg/ml in 0.05M bicarbonate buffer, pH 9.5), then washed three times with PBS. PBMC are isolated by F/H gradient centrifugation from human peripheral blood and added to quadruplicate wells (5×10⁴/well) of mAb coated plates in RPMI containing 10% FCS and P/S in the presence of varying concentrations of agonists or antagonists of the invention (total volume 200 ul). Relevant protein buffer and medium alone are controls. After 48 hr. culture at 37 degrees C., plates are spun for 2 min. at 1000 rpm and 100 μl of supernatant is removed and stored −20 degrees C. for measurement of IL-2 (or other cytokines) if effect on proliferation is observed. Wells are supplemented with 100 ul of medium containing 0.5 uCi of ³H-thymidine and cultured at 37 degrees C. for 18-24 hr. Wells are harvested and incorporation of ³H-thymidine used as a measure of proliferation. Anti-CD3 alone is the positive control for proliferation. IL-2 (100 U/ml) is also used as a control which enhances proliferation. Control antibody which does not induce proliferation of T cells is used as the negative control for the effects of agonists or antagonists of the invention.

[1109] The studies described in this example tested activity of agonists or antagonists of the invention. However, one skilled in the art could easily modify the exemplified studies to test the activity of polynucleotides or polypeptides of the invention (e.g., gene therapy).

### Example 23

### Effect of Agonists or Antagonists of the Invention on the Expression of MHC Class II, Costimulatory and Adhesion Molecules and Cell Differentiation of Monocytes and Monocyte-Derived Human Dendritic Cells

[1110] Dendritic cells are generated by the expansion of proliferating precursors found in the peripheral blood: adherent PBMC or elutriated monocytic fractions are cultured for 7-10 days with GM-CSF (50 ng/ml) and IL-4 (20 ng/ml). These dendritic cells have the characteristic phenotype of immature cells (expression of CD1, CD80, CD86, CD40 and MHC class II antigens). Treatment with activating factors, such as TNF-α, causes a rapid change in surface phenotype (increased expression of MHC class I and II, costimulatory and adhesion molecules, downregulation of FCγRII, upregulation of CD83). These changes correlate with increased antigen-presenting capacity and with functional maturation of the dendritic cells.

[1111] FACS analysis of surface antigens is performed as follows. Cells are treated 1-3 days with increasing concentrations of agonist or antagonist of the invention or LPS (positive control), washed with PBS containing 1% BSA and 0.02 mM sodium azide, and then incubated with 1:20 dilution of appropriate FITC- or PE-labeled monoclonal antibodies for 30 minutes at 4 degrees C. After an additional wash, the labeled cells are analyzed by flow cytometry on a FACScan (Becton Dickinson).

[1112] Effect on the production of cytokines. Cytokines generated by dendritic cells, in particular IL-12, are important in the initiation of T-cell dependent immune responses. IL-12 strongly influences the development of Thl helper T-cell immune response, and induces cytotoxic T and NK cell function. An ELISA is used to measure the IL-12 release as follows. Dendritic cells (10⁶/ml) are treated with increasing concentrations of agonists or antagonists of the invention for 24 hours. LPS (100 ng/ml) is added to the cell culture as positive control. Supernatants from the cell cultures are then collected and analyzed for IL-12 content using commercial ELISA kit (e.g., R & D Systems (Minneapolis, Minn.)). The standard protocols provided with the kits are used.

[1113] Effect on the expression of MHC Class II, costimulatory and adhesion molecules. Three major families of cell surface antigens can be identified on monocytes: adhesion molecules, molecules involved in antigen presentation, and Fc receptor. Modulation of the expression of MHC class II antigens and other costimulatory molecules, such as B7 and ICAM-1, may result in changes in the antigen presenting capacity of monocytes and ability to induce T cell activation. Increased expression of Fc receptors may correlate with improved monocyte cytotoxic activity, cytokine release and phagocytosis.

[1114] FACS analysis is used to examine the surface antigens as follows. Monocytes are treated 1-5 days with increasing concentrations of agonists or antagonists of the invention or LPS (positive control), washed with PBS containing 1% BSA and 0.02 mM sodium azide, and then incubated with 1:20 dilution of appropriate FITC- or PE-labeled monoclonal antibodies for 30 minutes at 4 degrees C. After an additional wash, the labeled cells are analyzed by flow cytometry on a FACScan (Becton Dickinson).

[1115] Monocyte activation and/or increased survival. Assays for molecules that activate (or alternatively, inactivate) monocytes and/or increase monocyte survival (or alternatively, decrease monocyte survival) are known in the art and may routinely be applied to determine whether a molecule of the invention functions as an inhibitor or activator of monocytes. Agonists or antagonists of the invention can be screened using the three assays described below. For each of these assays, Peripheral blood mononuclear cells (PBMC) are purified from single donor leukopacks (American Red Cross, Baltimore, Md.) by centrifugation through a Histopaque gradient (Sigma). Monocytes are isolated from PBMC by counterflow centrifugal elutriation.

[1116] Monocyte Survival Assay. Human peripheral blood monocytes progressively lose viability when cultured in absence of serum or other stimuli. Their death results from internally regulated processes (apoptosis). Addition to the culture of activating factors, such as TNF-alpha dramatically improves cell survival and prevents DNA fragmentation. Propidium iodide (PI) staining is used to measure apoptosis as follows. Monocytes are cultured for 48 hours in polypropylene tubes in serum-free medium (positive control), in the presence of 100 ng/ml TNF-alpha (negative control), and in the presence of varying concentrations of the compound to be tested. Cells are suspended at a concentration of 2×10⁶/ml in PBS containing PI at a final concentration of 5 μg/ml, and then incubated at room temperature for 5 minutes before FACScan analysis. PI uptake has been demonstrated to correlate with DNA fragmentation in this experimental paradigm.

[1117] Effect on cytokine release. An important function of monocytes/macrophages is their regulatory activity on other cellular populations of the immune system through the release of cytokines after stimulation. An ELISA to measure cytokine release is performed as follows. Human monocytes are incubated at a density of 5×10⁵ cells/ml with increasing concentrations of agonists or antagonists of the invention and under the same conditions, but in the absence of agonists or antagonists. For IL-12 production, the cells are primed overnight with IFN (100 U/ml) in the presence of agonist or antagonist of the invention. LPS (10 ng/ml) is then added. Conditioned media are collected after 24h and kept frozen until use. Measurement of TNF-alpha, IL-10, MCP-1 and IL-8 is then performed using a commercially available ELISA kit (e.g., R & D Systems (Minneapolis, Minn.)) and applying the standard protocols provided with the kit.

[1118] Oxidative burst. Purified monocytes are plated in 96-w plate at 2-1×10⁵ cell/well. Increasing concentrations of agonists or antagonists of the invention are added to the wells in a total volume of 0.2 ml culture medium (RPMI 1640+10% FCS, glutamine and antibiotics). After 3 days incubation, the plates are centrifuged and the medium is removed from the wells. To the macrophage monolayers, 0.2 ml per well of phenol red solution (140 mM NaCl, 10 mM potassium phosphate buffer pH 7.0, 5.5 mM dextrose, 0.56 mM phenol red and 19 U/ml of HRPO) is added, together with the stimulant (200 nM PMA). The plates are incubated at 37° C. for 2 hours and the reaction is stopped by adding 20 μl 1N NaOH per well. The absorbance is read at 610 nm. To calculate the amount of H₂^{O}₂ produced by the macrophages, a standard curve of a H₂O₂ solution of known molarity is performed for each experiment.

[1119] The studies described in this example tested activity of agonists or antagonists of the invention. However, one skilled in the art could easily modify the exemplified studies to test the activity of polynucleotides or polypeptides of the invention (e.g., gene therapy).

### Example 24

### Biological Effects of Agonists or Antagonists of the Invention

[1120] Astrocyte and Neuronal Assays

[1121] Agonists or antagonists of the invention, expressed in Escherichia coli and purified as described above, can be tested for activity in promoting the survival, neurite outgrowth, or phenotypic differentiation of cortical neuronal cells and for inducing the proliferation of glial fibrillary acidic protein immunopositive cells, astrocytes. The selection of cortical cells for the bioassay is based on the prevalent expression of FGF-1 and FGF-2 in cortical structures and on the previously reported enhancement of cortical neuronal survival resulting from FGF-2 treatment. A thymidine incorporation assay, for example, can be used to elucidate an agonist or antagonist of the invention's activity on these cells.

[1122] Moreover, previous reports describing the biological effects of FGF-2 (basic FGF) on cortical or hippocampal neurons in vitro have demonstrated increases in both neuron survival and neurite outgrowth (Walicke et al., “Fibroblast growth factor promotes survival of dissociated hippocampal neurons and enhances neurite extension.” Proc. Natl. Acad. Sci. USA 83:3012-3016. (1986), assay herein incorporated by reference in its entirety). However, reports from experiments done on PC-12 cells suggest that these two responses are not necessarily synonymous and may depend on not only which FGF is being tested but also on which receptor(s) are expressed on the target cells. Using the primary cortical neuronal culture paradigm, the ability of an agonist or antagonist of the invention to induce neurite outgrowth can be compared to the response achieved with FGF-2 using, for example, a thymidine incorporation assay.

[1123] Fibroblast and Endothelial Cell Assays

[1124] Human lung fibroblasts are obtained from Clonetics (San Diego, Calif.) and maintained in growth media from Clonetics. Dermal microvascular endothelial cells are obtained from Cell Applications (San Diego, Calif.). For proliferation assays, the human lung fibroblasts and dermal microvascular endothelial cells can be cultured at 5,000 cells/well in a 96-well plate for one day in growth medium. The cells are then incubated for one day in 0.1% BSA basal medium. After replacing the medium with fresh 0.1% BSA medium, the cells are incubated with the test proteins for 3 days. Alamar Blue (Alamar Biosciences, Sacramento, Calif.) is added to each well to a final concentration of 10%. The cells are incubated for 4 hr. Cell viability is measured by reading in a CytoFluor fluorescence reader. For the PGE₂ assays, the human lung fibroblasts are cultured at 5,000 cells/well in a 96-well plate for one day. After a medium change to 0.1% BSA basal medium, the cells are incubated with FGF-2 or agonists or antagonists of the invention with or without IL-1α for 24 hours. The supernatants are collected and assayed for PGE₂ by EIA kit (Cayman, Ann Arbor, Mich.). For the IL-6 assays, the human lung fibroblasts are cultured at 5,000 cells/well in a 96-well plate for one day. After a medium change to 0.1% BSA basal medium, the cells are incubated with FGF-2 or with or without agonists or antagonists of the invention IL-1α for 24 hours. The supernatants are collected and assayed for IL-6 by ELISA kit (Endogen, Cambridge, Mass.).

[1125] Human lung fibroblasts are cultured with FGF-2 or agonists or antagonists of the invention for 3 days in basal medium before the addition of Alamar Blue to assess effects on growth of the fibroblasts. FGF-2 should show a stimulation at 10-2500 ng/ml which can be used to compare stimulation with agonists or antagonists of the invention.

[1126] Parkinson Models.

[1127] The loss of motor function in Parkinson's disease is attributed to a deficiency of striatal dopamine resulting from the degeneration of the nigrostriatal dopaminergic projection neurons. An animal model for Parkinson's that has been extensively characterized involves the systemic administration of l-methyl-4 phenyl 1,2,3,6-tetrahydropyridine (MPTP). In the CNS, MPTP is taken-up by astrocytes and catabolized by monoamine oxidase B to 1-methyl-4-phenyl pyridine (MPP⁺) and released. Subsequently, MPP⁺ is actively accumulated in dopaminergic neurons by the high-affinity reuptake transporter for dopamine. MPP⁺ is then concentrated in mitochondria by the electrochemical gradient and selectively inhibits nicotidamide adenine disphosphate: ubiquinone oxidoreductionase (complex I), thereby interfering with electron transport and eventually generating oxygen radicals.

[1128] It has been demonstrated in tissue culture paradigms that FGF-2 (basic FGF) has trophic activity towards nigral dopaminergic neurons (Ferrari et al., Dev. Biol. 1989). Recently, Dr. Unsicker's group has demonstrated that administering FGF-2 in gel foam implants in the striatum results in the near complete protection of nigral dopaminergic neurons from the toxicity associated with MPTP exposure (Otto and Unsicker, J. Neuroscience, 1990).

[1129] Based on the data with FGF-2, agonists or antagonists of the invention can be evaluated to determine whether it has an action similar to that of FGF-2 in enhancing dopaminergic neuronal survival in vitro and it can also be tested in vivo for protection of dopaminergic neurons in the striatum from the damage associated with MPTP treatment. The potential effect of an agonist or antagonist of the invention is first examined in vitro in a dopaminergic neuronal cell culture paradigm. The cultures are prepared by dissecting the midbrain floor plate from gestation day 14 Wistar rat embryos. The tissue is dissociated with trypsin and seeded at a density of 200,000 cells/cm ² on polyorthinine-laminin coated glass coverslips. The cells are maintained in Dulbecco's Modified Eagle's medium and F12 medium containing hormonal supplements (N1). The cultures are fixed with paraformaldehyde after 8 days in vitro and are processed for tyrosine hydroxylase, a specific marker for dopaminergic neurons, immunohistochemical staining. Dissociated cell cultures are prepared from embryonic rats. The culture medium is changed every third day and the factors are also added at that time.

[1130] Since the dopaminergic neurons are isolated from animals at gestation day 14, a developmental time which is past the stage when the dopaminergic precursor cells are proliferating, an increase in the number of tyrosine hydroxylase immunopositive neurons would represent an increase in the number of dopaminergic neurons surviving in vitro. Therefore, if an agonist or antagonist of the invention acts to prolong the survival of dopaminergic neurons, it would suggest that the agonist or antagonist may be involved in Parkinson's Disease.

[1131] The studies described in this example tested activity of agonists or antagonists of the invention. However, one skilled in the art could easily modify the exemplified studies to test the activity of polynucleotides or polypeptides of the invention (e.g., gene therapy).

### Example 25

### The Effect of Agonists or Antagonists of the Invention on the Growth of Vascular Endothelial Cells

[1132] On day 1, human umbilical vein endothelial cells (HUVEC) are seeded at 2-5×10⁴ cells/35 mm dish density in M199 medium containing 4% fetal bovine serum (FBS), 16 units/ml heparin, and 50 units/ml endothelial cell growth supplements (ECGS, Biotechnique, Inc.). On day 2, the medium is replaced with M199 containing 10% FBS, 8 units/ml heparin. An agonist or antagonist of the invention, and positive controls, such as VEGF and basic FGF (bFGF) are added, at varying concentrations. On days 4 and 6, the medium is replaced. On day 8, cell number is determined with a Coulter Counter.

[1133] An increase in the number of HUVEC cells indicates that the compound of the invention may proliferate vascular endothelial cells, while a decrease in the number of HUVEC cells indicates that the compound of the invention inhibits vascular endothelial cells.

[1134] The studies described in this example tested activity of a polypeptide of the invention. However, one skilled in the art could easily modify the exemplified studies to test the activity of polynucleotides (e.g., gene therapy), agonists, and/or antagonists of the invention.

### Example 26

### Rat Corneal Wound Healing Model

[1135] This animal model shows the effect of an agonist or antagonist of the invention on neovascularization. The experimental protocol includes:

[1136] Making a 1-1.5 mm long incision from the center of cornea into the stromal layer.

[1137] Inserting a spatula below the lip of the incision facing the outer corner of the eye.

[1138] Making a pocket (its base is 1-1.5 mm form the edge of the eye).

[1139] Positioning a pellet, containing 50 ng-5 ug of an agonist or antagonist of the invention, within the pocket.

[1140] Treatment with an agonist or antagonist of the invention can also be applied topically to the corneal wounds in a dosage range of 20 mg -500 mg (daily treatment for five days).

[1141] The studies described in this example tested activity of agonists or antagonists of the invention. However, one skilled in the art could easily modify the exemplified studies to test the activity of polynucleotides or polypeptides of the invention (e.g., gene therapy).

### Example 27

### Diabetic Mouse and Glucocorticoid-Impaired Wound Healing Models

[1142] Diabetic db+/db+Mouse Model.

[1143] To demonstrate that an agonist or antagonist of the invention accelerates the healing process, the genetically diabetic mouse model of wound healing is used. The full thickness wound healing model in the db+/db+mouse is a well characterized, clinically relevant and reproducible model of impaired wound healing. Healing of the diabetic wound is dependent on formation of granulation tissue and re-epithelialization rather than contraction (Gartner, M. H. et al., J. Surg. Res. 52:389 (1992); Greenhalgh, D. G. et al., Am. J. Pathol. 136:1235 (1990)).

[1144] The diabetic animals have many of the characteristic features observed in Type II diabetes mellitus. Homozygous (db+/db+) mice are obese in comparison to their normal heterozygous (db+/+m) littermates. Mutant diabetic (db+/db+) mice have a single autosomal recessive mutation on chromosome 4 (db+) (Coleman et al. Proc. Natl. Acad. Sci. USA 77:283-293 (1982)). Animals show polyphagia, polydipsia and polyuria. Mutant diabetic mice (db+/db+) have elevated blood glucose, increased or normal insulin levels, and suppressed cell-mediated immunity (Mandel et al., J. Immunol. 120:1375 (1978); Debray-Sachs, M. et al., Clin. Exp. Immunol. 51(1):1-7 (1983); Leiter et al., Am. J. of Pathol. 114:46-55 (1985)). Peripheral neuropathy, myocardial complications, and microvascular lesions, basement membrane thickening and glomerular filtration abnormalities have been described in these animals (Norido, F. et al., Exp. Neurol. 83(2):221-232 (1984); Robertson et al., Diabetes 29(1):60-67 (1980); Giacomelli et al., Lab Invest 40(4):460-473 (1979); Coleman, D. L., Diabetes 31 (Suppl):1-6 (1982)). These homozygous diabetic mice develop hyperglycemia that is resistant to insulin analogous to human type II diabetes (Mandel et al., J. Immunol. 120:1375-1377 (1978)).

[1145] The characteristics observed in these animals suggests that healing in this model may be similar to the healing observed in human diabetes (Greenhalgh, et al., Am. J. of Pathol. 136:1235-1246 (1990)).

[1146] Genetically diabetic female C57BL/KsJ (db+/db+) mice and their non-diabetic (db+/+m) heterozygous littermates are used in this study (Jackson Laboratories). The animals are purchased at 6 weeks of age and are 8 weeks old at the beginning of the study. Animals are individually housed and received food and water ad libitum. All manipulations are performed using aseptic techniques. The experiments are conducted according to the rules and guidelines of Human Genome Sciences, Inc. Institutional Animal Care and Use Committee and the Guidelines for the Care and Use of Laboratory Animals.

[1147] Wounding protocol is performed according to previously reported methods (Tsuboi, R. and Rifkin, D. B., J. Exp. Med. 172:245-251 (1990)). Briefly, on the day of wounding, animals are anesthetized with an intraperitoneal injection of Avertin (0.01 mg/mL), 2,2,2-tribromoethanol and 2-methyl-2-butanol dissolved in deionized water. The dorsal region of the animal is shaved and the skin washed with 70% ethanol solution and iodine. The surgical area is dried with sterile gauze prior to wounding. An 8 mm full-thickness wound is then created using a Keyes tissue punch. Immediately following wounding, the surrounding skin is gently stretched to eliminate wound expansion. The wounds are left open for the duration of the experiment. Application of the treatment is given topically for 5 consecutive days commencing on the day of wounding. Prior to treatment, wounds are gently cleansed with sterile saline and gauze sponges.

[1148] Wounds are visually examined and photographed at a fixed distance at the day of surgery and at two day intervals thereafter. Wound closure is determined by daily measurement on days 1-5 and on day 8. Wounds are measured horizontally and vertically using a calibrated Jameson caliper. Wounds are considered healed if granulation tissue is no longer visible and the wound is covered by a continuous epithelium.

[1149] An agonist or antagonist of the invention is administered using at a range different doses, from 4 mg to 500 mg per wound per day for 8 days in vehicle. Vehicle control groups received 50 mL of vehicle solution.

[1150] Animals are euthanized on day 8 with an intraperitoneal injection of sodium pentobarbital (300 mg/kg). The wounds and surrounding skin are then harvested for histology and immunohistochemistry. Tissue specimens are placed in 10% neutral buffered formalin in tissue cassettes between biopsy sponges for further processing.

[1151] Three groups of 10 animals each (5 diabetic. and 5 non-diabetic controls) are evaluated: 1) Vehicle placebo control, 2) untreated group, and 3) treated group.

[1152] Wound closure is analyzed by measuring the area in the vertical and horizontal axis and obtaining the total square area of the wound. Contraction is then estimated by establishing the differences between the initial wound area (day 0) and that of post treatment (day 8). The wound area on day 1 is 64 mm², the corresponding size of the dermal punch. Calculations are made using the following formula:

[Open area on day 8]−[Open area on day 1]/[Open area on day 1]

[1153] Specimens are fixed in 10% buffered formalin and paraffin embedded blocks are sectioned perpendicular to the wound surface (5 mm) and cut using a Reichert-Jung microtome. Routine hematoxylin-eosin (H&E) staining is performed on cross-sections of bisected wounds. Histologic examination of the wounds are used to assess whether the healing process and the morphologic appearance of the repaired skin is altered by treatment with an agonist or antagonist of the invention. This assessment included verification of the presence of cell accumulation, inflammatory cells, capillaries, fibroblasts, re-epithelialization and epidermal maturity (Greenhalgh, D. G. et al., Am. J. PathoL 136:1235 (1990)). A calibrated lens micrometer is used by a blinded observer.

[1154] Tissue sections are also stained immunohistochemically with a polyclonal rabbit anti-human keratin antibody using ABC Elite detection system. Human skin is used as a positive tissue control while non-immune IgG is used as a negative control. Keratinocyte growth is determined by evaluating the extent of reepithelialization of the wound using a calibrated lens micrometer.

[1155] Proliferating cell nuclear antigen/cyclin (PCNA) in skin specimens is demonstrated by using anti-PCNA antibody (1:50) with an ABC Elite detection system. Human colon cancer served as a positive tissue control and human brain tissue is used as a negative tissue control. Each specimen included a section with omission of the primary antibody and substitution with non-immune mouse IgG. Ranking of these sections is based on the extent of proliferation on a scale of 0-8, the lower side of the scale reflecting slight proliferation to the higher side reflecting intense proliferation.

[1156] Experimental data are analyzed using an unpaired t test. A p value of <0.05 is considered significant.

[1157] Steroid Impaired Rat Model

[1158] The inhibition of wound healing by steroids has been well documented in various in vitro and in vivo systems (Wahl, Glucocorticoids and Wound healing. In: Anti-Inflammatory Steroid Action: Basic and Clinical Aspects. 280-302 (1989); Wahlet al., J. Immunol. 115: 476-481 (1975); Werb et al., J. Exp. Med. 147:1684-1694 (1978)). Glucocorticoids retard wound healing by inhibiting angiogenesis, decreasing vascular permeability (Ebert et al., An. Intern. Med. 37:701-705 (1952)), fibroblast proliferation, and collagen synthesis (Beck et al., Growth Factors. 5: 295-304 (1991); Haynes et al., J. Clin. Invest. 61: 703-797 (1978)) and producing a transient reduction of circulating monocytes (Haynes et al., J. Clin. Invest. 61: 703-797 (1978); Wahl, “Glucocorticoids and wound healing”, In: Antiinflammatory Steroid Action: Basic and Clinical Aspects, Academic Press, New York, pp. 280-302 (1989)). The systemic administration of steroids to impaired wound healing is a well establish phenomenon in rats (Beck et al., Growth Factors. 5: 295-304 (1991); Haynes et al., J. Clin. Invest. 61: 703-797 (1978); Wahl, “Glucocorticoids and wound healing”, In: Antiinflammatory Steroid Action: Basic and Clinical Aspects, Academic Press, New York, pp. 280-302 (1989); Pierce et al., Proc. Natl. Acad. Sci. USA 86: 2229-2233 (1989)).

[1159] To demonstrate that an agonist or antagonist of the invention can accelerate the healing process, the effects of multiple topical applications of the agonist or antagonist on full thickness excisional skin wounds in rats in which healing has been impaired by the systemic administration of methylprednisolone is assessed.

[1160] Young adult male Sprague Dawley rats weighing 250-300 g (Charles River Laboratories) are used in this example. The animals are purchased at 8 weeks of age and are 9 weeks old at the beginning of the study. The healing response of rats is impaired by the systemic administration of methylprednisolone (17 mg/kg/rat intramuscularly) at the time of wounding. Animals are individually housed and received food and water ad libitum. All manipulations are performed using aseptic techniques. This study is conducted according to the rules and guidelines of Human Genome Sciences, Inc. Institutional Animal Care and Use Committee and the Guidelines for the Care and Use of Laboratory Animals.

[1161] The wounding protocol is followed according to section A, above. On the day of wounding, animals are anesthetized with an intramuscular injection of ketamine (50 mg/kg) and xylazine (5 mg/kg). The dorsal region of the animal is shaved and the skin washed with 70% ethanol and iodine solutions. The surgical area is dried with sterile gauze prior to wounding. An 8 mm full-thickness wound is created using a Keyes tissue punch. The wounds are left open for the duration of the experiment. Applications of the testing materials are given topically once a day for 7 consecutive days commencing on the day of wounding and subsequent to methylprednisolone administration. Prior to treatment, wounds are gently cleansed with sterile saline and gauze sponges.

[1162] Wounds are visually examined and photographed at a fixed distance at the day of wounding and at the end of treatment. Wound closure is determined by daily measurement on days 1-5 and on day 8. Wounds are measured horizontally and vertically using a calibrated Jameson caliper. Wounds are considered healed if granulation tissue is no longer visible and the wound is covered by a continuous epithelium.

[1163] The agonist or antagonist of the invention is administered using at a range different doses, from 4 mg to 500 mg per wound per day for 8 days in vehicle. Vehicle control groups received 50 mL of vehicle solution.

[1164] Animals are euthanized on day 8 with an intraperitoneal injection of sodium pentobarbital (300 mg/kg). The wounds and surrounding skin are then harvested for histology. Tissue specimens are placed in 10% neutral buffered formalin in tissue cassettes between biopsy sponges for further processing.

[1165] Three groups of 10 animals each (5 with methylprednisolone and 5 without glucocorticoid) are evaluated: 1) Untreated group 2) Vehicle placebo control 3) treated groups.

[1166] Wound closure is analyzed by measuring the area in the vertical and horizontal axis and obtaining the total area of the wound. Closure is then estimated by establishing the differences between the initial wound area (day 0) and that of post treatment (day 8). The wound area on day 1 is 64 mm², the corresponding size of the dermal punch. Calculations are made using the following formula:

[Open area on day 8]-[Open area on day 1]/[Open area on day 1]

[1167] Specimens are fixed in 10% buffered formalin and paraffin embedded blocks are sectioned perpendicular to the wound surface (5 mm) and cut using an Olympus microtome. Routine hematoxylin-eosin (H&E) staining is performed on cross-sections of bisected wounds. Histologic examination of the wounds allows assessment of whether the healing process and the morphologic appearance of the repaired skin is improved by treatment with an agonist or antagonist of the invention. A calibrated lens micrometer is used by a blinded observer to determine the distance of the wound gap.

[1168] Experimental data are analyzed using an unpaired t test. A p value of <0.05 is considered significant.

[1169] The studies described in this example tested activity of agonists or antagonists of the invention. However, one skilled in the art could easily modify the exemplified studies to test the activity of polynucleotides or polypeptides of the invention (e.g., gene therapy).

### Example 28

### Lymphadema Animal Model

[1170] The purpose of this experimental approach is to create an appropriate and consistent lymphedema model for testing the therapeutic effects of an agonist or antagonist of the invention in lymphangiogenesis and re-establishment of the lymphatic circulatory system in the rat hind limb. Effectiveness is measured by swelling volume of the affected limb, quantification of the amount of lymphatic vasculature, total blood plasma protein, and histopathology. Acute lymphedema is observed for 7-10 days. Perhaps more importantly, the chronic progress of the edema is followed for up to 3-4 weeks.

[1171] Prior to beginning surgery, blood sample is drawn for protein concentration analysis. Male rats weighing approximately 350g are dosed with Pentobarbital. Subsequently, the right legs are shaved from knee to hip. The shaved area is swabbed with gauze soaked in 70% EtOH. Blood is drawn for serum total protein testing. Circumference and volumetric measurements are made prior to injecting dye into paws after marking 2 measurement levels (0.5 cm above heel, at mid-pt of dorsal paw). The intradermal dorsum of both right and left paws are injected with 0.05 ml of 1% Evan's Blue. Circumference and volumetric measurements are then made following injection of dye into paws.

[1172] Using the knee joint as a landmark, a mid-leg inguinal incision is made circumferentially allowing the femoral vessels to be located. Forceps and hemostats are used to dissect and separate the skin flaps. After locating the femoral vessels, the lymphatic vessel that runs along side and underneath the vessel(s) is located. The main lymphatic vessels in this area are then electrically coagulated or suture ligated.

[1173] Using a microscope, muscles in back of the leg (near the semitendinosis and adductors) are bluntly dissected. The popliteal lymph node is then located. The 2 proximal and 2 distal lymphatic vessels and distal blood supply of the popliteal node are then ligated by suturing. The popliteal lymph node, and any accompanying adipose tissue, is then removed by cutting connective tissues.

[1174] Care is taken to control any mild bleeding resulting from this procedure. After lymphatics are occluded, the skin flaps are sealed by using liquid skin (Vetbond) (A J Buck). The separated skin edges are sealed to the underlying muscle tissue while leaving a gap of ˜0.5 cm around the leg. Skin also may be anchored by suturing to underlying muscle when necessary.

[1175] To avoid infection, animals are housed individually with mesh (no bedding). Recovering animals are checked daily through the optimal edematous peak, which typically occurred by day 5-7. The plateau edematous peak are then observed. To evaluate the intensity of the lymphedema, the circumference and volumes of 2 designated places on each paw before operation and daily for 7 days are measured. The effect of plasma proteins on lymphedema is determined and whether protein analysis is a useful testing perimeter is also investigated. The weights of both control and edematous limbs are evaluated at 2 places. Analysis is performed in a blind manner.

[1176] Circumference Measurements: Under brief gas anesthetic to prevent limb movement, a cloth tape is used to measure limb circumference. Measurements are done at the ankle bone and dorsal paw by 2 different people and those 2 readings are averaged. Readings are taken from both control and edematous limbs.

[1177] Volumetric Measurements: On the day of surgery, animals are anesthetized with Pentobarbital and are tested prior to surgery. For daily volumetrics animals are under brief halothane anesthetic (rapid immobilization and quick recovery), and both legs are shaved and equally marked using waterproof marker on legs. Legs are first dipped in water, then dipped into instrument to each marked level, then measured by Buxco edema software(Chen/Victor). Data is recorded by one person, while the other is dipping the limb to marked area.

[1178] Blood-plasma protein measurements: Blood is drawn, spun, and serum separated prior to surgery and then at conclusion for total protein and Ca2⁺ comparison.

[1179] Limb Weight Comparison: After drawing blood, the animal is prepared for tissue collection. The limbs are amputated using a quillitine, then both experimental and control legs are cut at the ligature and weighed. A second weighing is done as the tibio-cacaneal joint is disarticulated and the foot is weighed.

[1180] Histological Preparations: The transverse muscle located behind the knee (popliteal) area is dissected and arranged in a metal mold, filled with freezeGel, dipped into cold methylbutane, placed into labeled sample bags at −80EC until sectioning. Upon sectioning, the muscle is observed under fluorescent microscopy for lymphatics.

[1181] The studies described in this example tested activity of agonists or antagonists of the invention. However, one skilled in the art could easily modify the exemplified studies to test the activity of polynucleotides or polypeptides of the invention (e.g., gene therapy).

### Example 29

### Suppression of TNF Alpha-Induced Adhesion Molecule Expression by a Agonist or Antagonist of the Invention

[1182] The recruitment of lymphocytes to areas of inflammation and angiogenesis involves specific receptor-ligand interactions between cell surface adhesion molecules (CAMs) on lymphocytes and the vascular endothelium. The adhesion process, in both normal and pathological settings, follows a multi-step cascade that involves intercellular adhesion molecule-1 (ICAM-1), vascular cell adhesion molecule-1 (VCAM-1), and endothelial leukocyte adhesion molecule-1 (E-selectin) expression on endothelial cells (EC). The expression of these molecules and others on the vascular endothelium determines the efficiency with which leukocytes may adhere to the local vasculature and extravasate into the local tissue during the development of an inflammatory response. The local concentration of cytokines and growth factor participate in the modulation of the expression of these CAMs.

[1183] Tumor necrosis factor alpha (TNF-a), a potent proinflammatory cytokine, is a stimulator of all three CAMs on endothelial cells and may be involved in a wide variety of inflammatory responses, often resulting in a pathological outcome.

[1184] The potential of an agonist or antagonist of the invention to mediate a suppression of TNF-a induced CAM expression can be examined. A modified ELISA assay which uses ECs as a solid phase absorbent is employed to measure the amount of CAM expression on TNF-a treated ECs when co-stimulated with a member of the FGF family of proteins.

[1185] To perform the experiment, human umbilical vein endothelial cell (HUVEC) cultures are obtained from pooled cord harvests and maintained in growth medium (EGM-2; Clonetics, San Diego, Calif.) supplemented with 10% FCS and 1% penicillin/streptomycin in a 37 degree C. humidified incubator containing 5% C02. HUVECs are seeded in 96-well plates at concentrations of 1×10⁴ cells/well in EGM medium at 37 degree C. for 18-24 hrs or until confluent. The monolayers are subsequently washed 3 times with a serum-free solution of RPMI-1640 supplemented with 100 U/ml penicillin and 100 mg/ml streptomycin, and treated with a given cytokine and/or growth factor(s) for 24 h at 37 degree C. Following incubation, the cells are then evaluated for CAM expression.

[1186] Human Umbilical Vein Endothelial cells (HUVECs) are grown in a standard 96 well plate to confluence. Growth medium is removed from the cells and replaced with 90 ul of 199 Medium (10% FBS). Samples for testing and positive or negative controls are added to the plate in triplicate (in 10 ul volumes). Plates are incubated at 37 degree C. for either 5 h (selectin and integrin expression) or 24 h (integrin expression only). Plates are aspirated to remove medium and 100 μl of 0.1% paraformaldehyde-PBS(with Ca++ and Mg++) is added to each well. Plates are held at 4° C. for 30 min.

[1187] Fixative is then removed from the wells and wells are washed 1× with PBS(+Ca,Mg)+0.5% BSA and drained. Do not allow the wells to dry. Add 10 μl of diluted primary antibody to the test and control wells. Anti-ICAM-1-Biotin, Anti-VCAM-1-Biotin and Anti-E-selectin-Biotin are used at a concentration of 10 μg/ml (1:10 dilution of 0.1 mg/ml stock antibody). Cells are incubated at 37° C. for 30 min. in a humidified environment. Wells are washed ×3 with PBS(+Ca,Mg)+0.5% BSA.

[1188] Then add 20 μl of diluted ExtrAvidin-Alkaline Phosphotase (1:5,000 dilution) to each well and incubated at 37° C. for 30 min. Wells are washed ×3 with PBS(+Ca,Mg)+0.5% BSA. 1 tablet of p-Nitrophenol Phosphate pNPP is dissolved in 5 ml of glycine buffer (pH 10.4). 100 μl of pNPP substrate in glycine buffer is added to each test well. Standard wells in triplicate are prepared from the working dilution of the ExtrAvidin-Alkaline Phosphotase in glycine buffer: 1:5,000 (10⁰)>10^{-0.056}>10⁻¹>10^{-1.5}.5 μl of each dilution is added to triplicate wells and the resulting AP content in each well is 5.50 ng, 1.74 ng, 0.55 ng, 0.18 ng. 100 μl of pNNP reagent must then be added to each of the standard wells. The plate must be incubated at 37° C. for 4h. A volume of 50 μl of 3M NaOH is added to all wells. The results are quantified on a plate reader at 405 nm. The background subtraction option is used on blank wells filled with glycine buffer only. The template is set up to indicate the concentration of AP-conjugate in each standard well [5.50 ng; 1.74 ng; 0.55 ng; 0.18 ng]. Results are indicated as amount of bound AP-conjugate in each sample.

[1189] The studies described in this example tested activity of agonists or antagonists of the invention. However, one skilled in the art could easily modify the exemplified studies to test the activity of polynucleotides or polypeptides of the invention (e.g., gene therapy).

### Example 30

### Production of Polypeptide of the Invention for High-Throughput Screening Assays

[1190] The following protocol produces a supernatant containing polypeptide of the present invention to be tested. This supernatant can then be used in the Screening Assays described in Examples 32-41.

[1191] First, dilute Poly-D-Lysine (644 587 Boehringer-Mannheim) stock solution (1 mg/ml in PBS) 1:20 in PBS (w/o calcium or magnesium 17-516F Biowhittaker) for a working solution of 50 ug/ml. Add 200 ul of this solution to each well (24 well plates) and incubate at RT for 20 minutes. Be sure to distribute the solution over each well (note: a 12-channel pipetter may be used with tips on every other channel). Aspirate off the Poly-D-Lysine solution and rinse with 1 ml PBS (Phosphate Buffered Saline). The PBS should remain in the well until just prior to plating the cells and plates may be poly-lysine coated in advance for up to two weeks.

[1192] Plate 293T cells (do not carry cells past P+20) at 2×10⁵ cells/well in 0.5 ml DMEM(Dulbecco's Modified Eagle Medium)(with 4.5 G/L glucose and L-glutamine (12-604F Biowhittaker))/10% heat inactivated FBS(14-503F Biowhittaker)/1×Penstrep(17-602E Biowhittaker). Let the cells grow overnight.

[1193] The next day, mix together in a sterile solution basin: 300 ul Lipofectamine (18324-012 Gibco/BRL) and 5 ml Optimem I (31985070 Gibco/BRL)/96-well plate. With a small volume multi-channel pipetter, aliquot approximately 2 ug of an expression vector containing a polynucleotide insert, produced by the methods described in Examples 8-10, into an appropriately labeled 96-well round bottom plate. With a multi-channel pipetter, add 50 ul of the Lipofectamine/Optimem I mixture to each well. Pipette up and down gently to mix. Incubate at RT 15-45 minutes. After about 20 minutes, use a multi-channel pipetter to add 150 ul Optimem I to each well. As a control, one plate of vector DNA lacking an insert should be transfected with each set of transfections.

[1194] Preferably, the transfection should be performed by tag-teaming the following tasks. By tag-teaming, hands on time is cut in half, and the cells do not spend too much time on PBS. First, person A aspirates off the media from four 24-well plates of cells, and then person B rinses each well with 0.5-1 ml PBS. Person A then aspirates off PBS rinse, and person B, using a12-channel pipetter with tips on every other channel, adds the 200 ul of DNA/Lipofectamine/Optimem I complex to the odd wells first, then to the even wells, to each row on the 24-well plates. Incubate at 37 degree C. for 6 hours.

[1195] While cells are incubating, prepare appropriate media, either 1% BSA in DMEM with 1× penstrep, or HGS CHO-5 media (116.6 mg/L of CaC12 (anhyd); 0.00130 mg/L CuSO₄-5H₂O; 0.050 mg/L of Fe(NO₃)₃-9H₂O; 0.417 mg/L ofFeSO₄-7H₂O; 311.80 mg/L of Kcl; 28.64 mg/L of MgCl₂; 48.84 mg/L of MgSO₄; 6995.50 mg/L of NaCl; 2400.0 mg/L of NaHCO₃; 62.50 mg/L of NaH₂PO₄-H₂O; 71.02 mg/L of Na₂HPO4; 0.4320 mg/L of ZnSO4-7H₂^{O;} 0.002 mg/L of Arachidonic Acid; 1.022 mg/L of Cholesterol; 0.070 mg/L of DL-alpha-Tocopherol-Acetate; 0.0520 mg/L of Linoleic Acid; 0.010 mg/L of Linolenic Acid; 0.010 mg/L of Myristic Acid; 0.010 mg/L of Oleic Acid; 0.010 mg/L of Palmitric Acid; 0.010 mg/L of Palmitic Acid; 100 mg/L of Pluronic F-68; 0.010 mg/L of Stearic Acid; 2.20 mg/L of Tween 80; 4551 mg/L of D-Glucose; 130.85 mg/ml of L-Alanine; 147.50 mg/ml of L-Arginine-HCL; 7.50 mg/ml of L-Asparagine-H20; 6.65 mg/ml of L-Aspartic Acid; 29.56 mg/ml of L-Cystine-2HCL-H₂O; 31.29 mg/ml of L-Cystine-2HCL; 7.35 mg/ml of L-Glutamic Acid; 365.0 mg/ml of L-Glutamine; 18.75 mg/ml of Glycine; 52.48 mg/ml of L-Histidine-HCL-H₂O; 106.97 mg/ml of L-Isoleucine; 111.45 mg/ml of L-Leucine; 163.75 mg/ml of L-Lysine HCL; 32.34 mg/ml of L-Methionine; 68.48 mg/ml of L-Phenylalainine; 40.0 mg/ml of L-Proline; 26.25 mg/ml of L-Serine; 101.05 mg/ml of L-Threonine; 19.22 mg/ml of L-Tryptophan; 91.79 mg/ml of L-Tryrosine-2Na-2H₂O; and 99.65 mg/ml of L-Valine; 0.0035 mg/L of Biotin; 3.24 mg/L of D-Ca Pantothenate; 11.78 mg/L of Choline Chloride; 4.65 mg/L of Folic Acid; 15.60 mg/L of i-Inositol; 3.02 mg/L of Niacinamide; 3.00 mg/L of Pyridoxal HCL; 0.031 mg/L of Pyridoxine HCL; 0.319 mg/L of Riboflavin; 3.17 mg/L of Thiamine HCL; 0.365 mg/L of Thymidine; 0.680 mg/L of Vitamin B₁₂; 25 mM of HEPES Buffer; 2.39 mg/L of Na Hypoxanthine; 0.105 mg/L of Lipoic Acid; 0.081 mg/L of Sodium Putrescine-2HCL; 55.0 mg/L of Sodium Pyruvate; 0.0067 mg/L of Sodium Selenite; 20uM of Ethanolamine; 0.122 mg/L of Ferric Citrate; 41.70 mg/L of Methyl-B-Cyclodextrin complexed with Linoleic Acid; 33.33 mg/L of Methyl-B-Cyclodextrin complexed with Oleic Acid; 10 mg/L of Methyl-B-Cyclodextrin complexed with Retinal Acetate. Adjust osmolarity to 327 mOsm) with 2 mm glutamine and 1× penstrep. (BSA (81-068-3 Bayer) 100gm dissolved in IL DMEM for a 10% BSA stock solution). Filter the media and collect 50 ul for endotoxin assay in 15 ml polystyrene conical.

[1196] The transfection reaction is terminated, preferably by tag-teaming, at the end of the incubation period. Person A aspirates off the transfection media, while person B adds 1.5 ml appropriate media to each well. Incubate at 37 degree C. for 45 or 72 hours depending on the media used: 1% BSA for 45 hours or CHO-5 for 72 hours.

[1197] On day four, using a 300 ul multichannel pipetter, aliquot 600 ul in one 1 ml deep well plate and the remaining supernatant into a 2 ml deep well. The supernatants from each well can then be used in the assays described in Examples 32-39.

[1198] It is specifically understood that when activity is obtained in any of the assays described below using a supernatant, the activity originates from either the polypeptide of the present invention directly (e.g., as a secreted protein) or by polypeptide of the present invention inducing expression of other proteins, which are then secreted into the supernatant. Thus, the invention further provides a method of identifying the protein in the supernatant characterized by an activity in a particular assay.

### Example 31

### Construction of GAS Reporter Construct

[1199] One signal transduction pathway involved in the differentiation and proliferation of cells is called the Jaks-STATs pathway. Activated proteins in the Jaks-STATs pathway bind to gamma activation site “GAS” elements or interferon-sensitive responsive element (“ISRE”), located in the promoter of many genes. The binding of a protein to these elements alter the expression of the associated gene.

[1200] GAS and ISRE elements are recognized by a class of transcription factors called Signal Transducers and Activators of Transcription, or “STATs.” There are six members of the STATs family. Stat1 and Stat3 are present in many cell types, as is Stat2 (as response to IFN-alpha is widespread). Stat4 is more restricted and is not in many cell types though it has been found in T helper class I, cells after treatment with IL-12. Stat5 was originally called mammary growth factor, but has been found at higher concentrations in other cells including myeloid cells. It can be activated in tissue culture cells by many cytokines.

[1201] The STATs are activated to translocate from the cytoplasm to the nucleus upon tyrosine phosphorylation by a set of kinases known as the Janus Kinase (“Jaks”) family. Jaks represent a distinct family of soluble tyrosine kinases and include Tyk2, Jak1, Jak2, and Jak3. These kinases display significant sequence similarity and are generally catalytically inactive in resting cells.

[1202] The Jaks are activated by a wide range of receptors summarized in the Table below. (Adapted from review by Schidler and Darnell, Ann. Rev. Biochem. 64:621-51 (1995).) A cytokine receptor family, capable of activating Jaks, is divided into two groups: (a) Class 1 includes receptors for IL-2, IL-3, IL-4, IL-6, IL-7, IL-9, IL-11, IL-12, 1L-15, Epo, PRL, GH, G-CSF, GM-CSF, LIF, CNTF, and thrombopoietin; and (b) Class 2 includes IFN-a, IFN-g, and IL-10. The Class 1 receptors share a conserved cysteine motif (a set of four conserved cysteines and one tryptophan) and a WSXWS motif (a membrane proximal region encoding Trp-Ser-Xaa-Trp-Ser (SEQ ID NO:2)).

[1203] Thus, on binding of a ligand to a receptor, Jaks are activated, which in turn activate STATs, which then translocate and bind to GAS elements. This entire process is encompassed in the Jaks-STATs signal transduction pathway.

[1204] Therefore, activation of the Jaks-STATs pathway, reflected by the binding of the GAS or the ISRE element, can be used to indicate proteins involved in the proliferation and differentiation of cells. For example, growth factors and cytokines are known to activate the Jaks-STATs pathway. (See Table below.) Thus, by using GAS elements linked to reporter molecules, activators of the Jaks-STATs pathway can be identified.

| | | JAKs | | | | |
|---|---|---|---|---|---|---|
| Ligand | tyk2 | Jak1 | Jak2 | Jak3 | STATS | GAS(elements) or ISRE |
| IFN family | | | | | | |
| IFN-a/B | + | + | − | − | 1, 2, 3 | ISRE |
| IFN-g | | + | + | − | 1 | GAS (IRF1 > Lys6 > IFP) |
| Il-10 | + | ? | ? | − | 1, 3 | |
| gp130 family | | | | | | |
| IL-6 (Pleiotropic) | + | + | + | ? | 1, 3 | GAS (IRF1 > Lys6 > IFP) |
| Il-11(Pleiotropic) | ? | + | ? | ? | 1, 3 | |
| OnM(Pleiotropic) | ? | + | + | ? | 1, 3 | |
| LIF(Pleiotropic) | ? | + | + | ? | 1, 3 | |
| CNTF(Pleiotropic) | −/+ | + | + | ? | 1, 3 | |
| G-CSF(Pleiotropic) | ? | + | ? | ? | 1, 3 | |
| IL-12(Pleiotropic) | ? | − | + | + | 1, 3 | |
| g-C family | | | | | | |
| IL-2 (lymphocytes) | − | + | − | + | 1, 3, 5 | GAS |
| IL-4 (lymph/myeloid) | − | + | − | + | 6 | GAS (IRF1 = IFP >> Ly6)(IgH) |
| IL-7 (lymphocytes) | − | + | − | + | 5 | GAS |
| IL-9 (lymphocytes) | − | + | − | + | 5 | GAS |
| IL-13 (lymphocyte) | − | + | ? | ? | 6 | GAS |
| IL-15 | ? | + | ? | + | 5 | GAS |
| gp140 family | | | | | | |
| IL-3 (myeloid) | − | − | + | − | 5 | GAS (IRF1 > IFP >> Ly6) |
| IL-5 (myeloid) | − | − | + | − | 5 | GAS |
| GM-CSF (myeloid) | − | − | + | − | 5 | GAS |
| Growth hormone family | | | | | | |
| GH | ? | − | + | − | 5 | |
| PRL | ? | +/− | + | − | 1, 3, 5 | |
| EPO | ? | − | + | − | 5 | GAS |
| | | | | | | (B-CAS > IRF1 = IFP >> Ly6) |
| Receptor Tyrosine Kinases | | | | | | |
| EGF | ? | + | + | − | 1, 3 | GAS (IRF1) |
| PDGF | ? | + | + | − | 1, 3 | |
| CSF-1 | ? | + | + | − | 1, 3 | GAS (not IRF1) |

[1205] To construct a synthetic GAS containing promoter element, which is used in the Biological Assays described in Examples 32-33, a PCR based strategy is employed to generate a GAS-SV40 promoter sequence. The 5′ primer contains four tandem copies of the GAS binding site found in the IRF™ promoter and previously demonstrated to bind STATs upon induction with a range of cytokines (Rothman et al., Immunity 1:457-468 (1994).), although other GAS or ISRE elements can be used instead. The 5′ primer also contains 18 bp of sequence complementary to the SV40 early promoter sequence and is flanked with an XhoI site. The sequence of the 5′ primer is:

| | |
|---|---|
| 5′:GCGCCTCGAGATTTCCCCGAAATCTAGATTTCCC | (SEQ ID NO:3) |
| CGAAATGATTTCCCCGAAATGATTTCCCCGAAATATC | |
| TGCCATCTCAATTAG:3′ | |

[1206] The downstream primer is complementary to the SV40 promoter and is flanked with a Hind III site: 5′:GCGGCAAGCTTTTTGCAAAGCCTAGGC:3′ (SEQ ID NO: 4)

[1207] PCR amplification is performed using the SV40 promoter template present in the B-gal:promoter plasmid obtained from Clontech. The resulting PCR fragment is digested with XhoII/Hind III and subcloned into BLSK2-. (Stratagene.) Sequencing with forward and reverse primers confirms that the insert contains the following sequence:

(SEQ ID NO:5)

5′:CTCGAGATTTCCCCGAAATCTAGATTTCCCCGAAATGATTTCCCCGA
AATGATTTCCCCGAAATATCTGCCATCTCAATTAGTCAGCAACCATAGTC
CCGCCCCTAACTCCGCCCATCCCGCCCCTAACTCCGCCCAGTTCCGCCCA
TTCTCCGCCCCATGGCTGACTAATTTTTTTTATTTATGCAGAGGCCGAGG
CCGCCTCGGCCTCTGAGCTATTCCAGAAGTAGTGAGGAGGCTTTTTTGGA
GGCCTAGGCTTTTGCAAAAAGCTT:3′

[1208] With this GAS promoter element linked to the SV40 promoter, a GAS:SEAP2 reporter construct is next engineered. Here, the reporter molecule is a secreted alkaline phosphatase, or “SEAP.” Clearly, however, any reporter molecule can be used instead of SEAP, in this or in any of the other Examples. Well known reporter molecules that can be used instead of SEAP include chloramphenicol acetyltransferase (CAT), luciferase, alkaline phosphatase, B-galactosidase, green fluorescent protein (GFP), or any protein detectable by an antibody.

[1209] The above sequence confirmed synthetic GAS-SV40 promoter element is subcloned into the pSEAP-Promoter vector obtained from Clontech using HindIII and XhoI, effectively replacing the SV40 promoter with the amplified GAS:SV40 promoter element, to create the GAS-SEAP vector. However, this vector does not contain a neomycin resistance gene, and therefore, is not preferred for mammalian expression systems.

[1210] Thus, in order to generate mammalian stable cell lines expressing the GAS-SEAP reporter, the GAS-SEAP cassette is removed from the GAS-SEAP vector using SalI and NotI, and inserted into a backbone vector containing the neomycin resistance gene, such as pGFP-1 (Clontech), using these restriction sites in the multiple cloning site, to create the GAS-SEAP/Neo vector. Once this vector is transfected into mammalian cells, this vector can then be used as a reporter molecule for GAS binding as described in Examples 32-33.

[1211] Other constructs can be made using the above description and replacing GAS with a different promoter sequence. For example, construction of reporter molecules containing NFK-B and EGR promoter sequences are described in Examples 34 and 35. However, many other promoters can be substituted using the protocols described in these Examples. For instance, SRE, IL-2, NFAT, or Osteocalcin promoters can be substituted, alone or in combination (e.g., GAS/NF-KB/EGR, GAS/NF-KB, Il-2/NFAT, or NF-KB/GAS). Similarly, other cell lines can be used to test reporter construct activity, such as HELA (epithelial), HUVEC (endothelial), Reh (B-cell), Saos-2 (osteoblast), HUVAC (aortic), or Cardiomyocyte.

### Example 32

### High-Throughput Screening Assay for T-cell Activity

[1212] The following protocol is used to assess T-cell activity by identifying factors, and determining whether supernate containing a polypeptide of the invention proliferates and/or differentiates T-cells. T-cell activity is assessed using the GAS/SEAP/Neo construct produced in Example 31. Thus, factors that increase SEAP activity indicate the ability to activate the Jaks-STATS signal transduction pathway. The T-cell used in this assay is Jurkat T-cells (ATCC Accession No. TIB-152), although Molt-3 cells (ATCC Accession No. CRL-1552) and Molt-4 cells (ATCC Accession No. CRL-1582) cells can also be used.

[1213] Jurkat T-cells are lymphoblastic CD4+Th1 helper cells. In order to generate stable cell lines, approximately 2 million Jurkat cells are transfected with the GAS-SEAP/neo vector using DMRIE-C (Life Technologies)(transfection procedure described below). The transfected cells are seeded to a density of approximately 20,000 cells per well and transfectants resistant to 1 mg/ml genticin selected. Resistant colonies are expanded and then tested for their response to increasing concentrations of interferon gamma. The dose response of a selected clone is demonstrated.

[1214] Specifically, the following protocol will yield sufficient cells for 75 wells containing 200 ul of cells. Thus, it is either scaled up, or performed in multiple to generate sufficient cells for multiple 96 well plates. Jurkat cells are maintained in RPMI+10% serum with 1% Pen-Strep. Combine 2.5 mls of OPTI-MEM (Life Technologies) with 10 ug of plasmid DNA in a T25 flask. Add 2.5 ml OPTI-MEM containing 50 ul of DMRIE-C and incubate at room temperature for 15-45 mins.

[1215] During the incubation period, count cell concentration, spin down the required number of cells (10⁷ per transfection), and resuspend in OPTI-MEM to a final concentration of 10⁷ cells/ml. Then add 1 ml of 1×10⁷ cells in OPTI-MEM to T25 flask and incubate at 37 degree C. for 6 hrs. After the incubation, add 10 ml of RPMI+15% serum.

[1216] The Jurkat:GAS-SEAP stable reporter lines are maintained in RPMI +10% serum, 1 mg/ml Genticin, and 1% Pen-Strep. These cells are treated with supernatants containing polypeptide of the present invention or polypeptide of the present invention induced polypeptides as produced by the protocol described in Example 30.

[1217] On the day of treatment with the supernatant, the cells should be washed and resuspended in fresh RPMI +10% serum to a density of 500,000 cells per ml. The exact number of cells required will depend on the number of supernatants being screened. For one 96 well plate, approximately 10 million cells (for 10 plates, 100 million cells) are required.

[1218] Transfer the cells to a triangular reservoir boat, in order to dispense the cells into a 96 well dish, using a 12 channel pipette. Using a 12 channel pipette, transfer 200 ul of cells into each well (therefore adding 100, 000 cells per well).

[1219] After all the plates have been seeded, 50 ul of the supernatants are transferred directly from the 96 well plate containing the supernatants into each well using a 12 channel pipette. In addition, a dose of exogenous interferon gamma (0.1, 1.0, 10 ng) is added to wells H9, H 10, and H11 to serve as additional positive controls for the assay.

[1220] The 96 well dishes containing Jurkat cells treated with supernatants are placed in an incubator for 48 hrs (note: this time is variable between 48-72 hrs). 35 ul samples from each well are then transferred to an opaque 96 well plate using a 12 channel pipette. The opaque plates should be covered (using sellophene covers) and stored at −20 degree C. until SEAP assays are performed according to Example 36. The plates containing the remaining treated cells are placed at 4 degree C. and serve as a source of material for repeating the assay on a specific well if desired.

[1221] As a positive control, 100 Unit/ml interferon gamma can be used which is known to activate Jurkat T cells. Over 30 fold induction is typically observed in the positive control wells.

[1222] The above protocol may be used in the generation of both transient, as well as stable, transfected cells, which would be apparent to those of skill in the art.

### Example 33

### High-Throughput Screening Assay Identifying Myeloid Activity

[1223] The following protocol is used to assess myeloid activity of polypeptide of the present invention by determining whether polypeptide of the present invention proliferates and/or differentiates myeloid cells. Myeloid cell activity is assessed using the GAS/SEAP/Neo construct produced in Example 31. Thus, factors that increase SEAP activity indicate the ability to activate the Jaks-STATS signal transduction pathway. The myeloid cell used in this assay is U937, a pre-monocyte cell line, although TF-1, HL60, or KG1 can be used.

[1224] To transiently transfect U937 cells with the GAS/SEAP/Neo construct produced in Example 31, a DEAE-Dextran method (Kharbanda et. al., 1994, Cell Growth & Differentiation, 5:259-265) is used. First, harvest 2×10⁷U937 cells and wash with PBS. The U937 cells are usually grown in RPMI 1640 medium containing 10% heat-inactivated fetal bovine serum (FBS) supplemented with 100 units/ml penicillin and 100 mg/ml streptomycin.

[1225] Next, suspend the cells in 1 ml of 20 mM Tris-HCI (pH 7.4) buffer containing 0.5 mg/ml DEAE-Dextran, 8 ug GAS-SEAP2 plasmid DNA, 140 mM NaCl, 5 mM KCl, 375 uM Na₂HPO₄, 0.7H₂O, 1 mM MgCl₂, and 675 uM CaCl₂. Incubate at 37 degrees C. for 45 min.

[1226] Wash the cells with RPMI 1640 medium containing 10% FBS and then resuspend in 10 ml complete medium and incubate at 37 degree C. for 36 hr.

[1227] The GAS-SEAP/U937 stable cells are obtained by growing the cells in 400 ug/ml G418. The G418-free medium is used for routine growth but every one to two months, the cells should be re-grown in 400 ug/ml G418 for couple of passages.

[1228] These cells are tested by harvesting 1×10⁸ cells (this is enough for ten 96-well plates assay) and wash with PBS. Suspend the cells in 200 ml above described growth medium, with a final density of 5×10⁵ cells/ml. Plate 200 ul cells per well in the 96-well plate (or 1×10⁵ cells/well).

[1229] Add 50 ul of the supernatant prepared by the protocol described in Example 30. Incubate at 37 degee C for 48 to 72 hr. As a positive control, 100 Unit/ml interferon gamma can be used which is known to activate U937 cells. Over 30 fold induction is typically observed in the positive control wells. SEAP assay the supernatant according to the protocol described in Example 36.

### Example 34

### High-Throughput Screening Assay Identifying Neuronal Activity

[1230] When cells undergo differentiation and proliferation, a group of genes are activated through many different signal transduction pathways. One of these genes, EGR1 (early growth response gene 1), is induced in various tissues and cell types upon activation. The promoter of EGR1 is responsible for such induction. Using the EGR1 promoter linked to reporter molecules, activation of cells can be assessed by polypeptide of the present invention.

[1231] Particularly, the following protocol is used to assess neuronal activity in PC12 cell lines. PC12 cells (rat phenochromocytoma cells) are known to proliferate and/or differentiate by activation with a number of mitogens, such as TPA (tetradecanoyl phorbol acetate), NGF (nerve growth factor), and EGF (epidermal growth factor). The EGR1 gene expression is activated during this treatment. Thus, by stably transfecting PC 12 cells with a construct containing an EGR promoter linked to SEAP reporter, activation of PC 12 cells by polypeptide of the present invention can be assessed.

[1232] The EGR/SEAP reporter construct can be assembled by the following protocol. The EGR-1 promoter sequence (-633 to +1)(Sakamoto K et al., Oncogene 6:867-871 (1991)) can be PCR amplified from human genomic DNA using the following primers:

(SEQ ID NO:6)

5′ GCGCTCGAGGGATGACAGCGATAGAACCCCGG-3′

(SEQ ID NO:7)

5′ GCGAAGCTTCGCGACTCCCCGGATCCGCCTC-3′

[1233] Using the GAS:SEAP/Neo vector produced in Example 31, EGR1 amplified product can then be inserted into this vector. Linearize the GAS:SEAP/Neo vector using restriction enzymes XhoI/HindIII, removing the GAS/SV40 stuffer. Restrict the EGR1 amplified product with these same enzymes. Ligate the vector and the EGR1 promoter.

[1234] To prepare 96 well-plates for cell culture, two mls of a coating solution (1:30 dilution of collagen type I (Upstate Biotech Inc. Cat#08-115) in 30% ethanol (filter sterilized)) is added per one 10 cm plate or 50 ml per well of the 96-well plate, and allowed to air dry for 2 hr.

[1235] PC12 cells are routinely grown in RPM1-1640 medium (Bio Whittaker) containing 10% horse serum (JRH BIOSCIENCES, Cat. # 12449-78P), 5% heat-inactivated fetal bovine serum (FBS) supplemented with 100 units/ml penicillin and 100 ug/ml streptomycin on a precoated 10 cm tissue culture dish. One to four split is done every three to four days. Cells are removed from the plates by scraping and resuspended with pipetting up and down for more than 15 times.

[1236] Transfect the EGR/SEAP/Neo construct into PC 12 using the Lipofectamine protocol described in Example 30. EGR-SEAP/PC12 stable cells are obtained by growing the cells in 300 ug/ml G418. The G418-free medium is used for routine growth but every one to two months, the cells should be re-grown in 300 ug/ml G418 for couple of passages.

[1237] To assay for neuronal activity, a 10 cm plate with cells around 70 to 80% confluent is screened by removing the old medium. Wash the cells once with PBS (Phosphate buffered saline). Then starve the cells in low serum medium (RPMI-1640 containing 1% horse serum and 0.5% FBS with antibiotics) overnight.

[1238] The next morning, remove the medium and wash the cells with PBS. Scrape off the cells from the plate, suspend the cells well in 2 ml low serum medium. Count the cell number and add more low serum medium to reach final cell density as 5×10⁵ cells/ml.

[1239] Add 200 ul of the cell suspension to each well of 96-well plate (equivalent to 1×10⁵ cells/well). Add 50 ul supernatant produced, by Example 30, 37 degree C. for 48 to 72 hr. As a positive control, a growth factor known to activate PC12 cells through EGR can be used, such as 50 ng/ul of Neuronal Growth Factor (NGF). Over fifty-fold induction of SEAP is typically seen in the positive control wells. SEAP assay the supernatant according to Example 36.

### Example 35

### High-Throughput Screening Assay for T-cell Activity

[1240] NF-KB (Nuclear Factor KB) is a transcription factor activated by a wide variety of agents including the inflammatory cytokines IL-1 and TNF, CD30 and CD40, lymphotoxin-alpha and lymphotoxin-beta, by exposure to LPS or thrombin, and by expression of certain viral gene products. As a transcription factor, NF-KB regulates the expression of genes involved in immune cell activation, control of apoptosis (NF-KB appears to shield cells from apoptosis), B and T-cell development, anti-viral and antimicrobial responses, and multiple stress responses.

[1241] In non-stimulated conditions, NF-KB is retained in the cytoplasm with I-KB (Inhibitor KB). However, upon stimulation, I-KB is phosphorylated and degraded, causing NF-KB to shuttle to the nucleus, thereby activating transcription of target genes. Target genes activated by NF-KB include IL-2, IL-6, GM-CSF, ICAM-I and class 1 MHC.

[1242] Due to its central role and ability to respond to a range of stimuli, reporter constructs utilizing the NF-KB promoter element are used to screen the supernatants produced in Example 30. Activators or inhibitors of NF-KB would be useful in treating, preventing, and/or diagnosing diseases. For example, inhibitors of NF-KB could be used to treat those diseases related to the acute or chronic activation of NF-KB, such as rheumatoid arthritis.

[1243] To construct a vector containing the NF-KB promoter element, a PCR based strategy is employed. The upstream primer contains four tandem copies of the NF-KB binding site (GGGGACTTTCCC) (SEQ ID NO: 8), 18 bp of sequence complementary to the 5′ end of the SV40 early promoter sequence, and is flanked with an XhoI site:

| | |
|---|---|
| 5′:GCGGCCTCGAGGGGACTTTCCCGGGGACTTTCCG | (SEQ ID NO:9) |
| GGGACTTTCCGGGACTTTCCATCCTGCCATCTCAATT | |
| AG:3′ | |

[1244] The downstream primer is complementary to the 3′ end of the SV40 promoter and is flanked with a Hind III site:

| | |
|---|---|
| 5′:GCGGCAAGCTTTTTGCAAAGCCTAGGC:3′ | (SEQ ID NO:4) |

[1245] PCR amplification is performed using the SV40 promoter template present in the pB-gal:promoter plasmid obtained from Clontech. The resulting PCR fragment is digested with XhoI and Hind III and subcloned into BLSK2-. (Stratagene) Sequencing with the T7 and T3 primers confirms the insert contains the following sequence:

(SEQ ID NO:10)

5′:CTCGAGGGGACTTTCCCGGGGACTTTCCGGGGACTTTCCGGGACTTT
CCATCTGCCATCTCAATTAGTCAGCAACCATAGTCCCGCCCCTAACTCCG
CCCATCCCGCCCCTAACTCCGCCCAGTTCCGCCCATTCTCCGCCCCATGG
CTGACTAATTTTTTTTATTTATGCAGAGGCCGAGGCCGCCTCGGCCTCTG
AGCTATTCCAGAAGTAGTGAGGAGGCTTTTTTGGAGGCCTAGGCTTTTGC
AAAAAGCTT:3′

[1246] Next, replace the SV40 minimal promoter element present in the pSEAP2-promoter plasmid (Clontech) with this NF-KB/SV40 fragment using XhoI and HindIlI. However, this vector does not contain a neomycin resistance gene, and therefore, is not preferred for mammalian expression systems.

[1247] In order to generate stable mammalian cell lines, the NF-KB/SV40/SEAP cassette is removed from the above NF-KB/SEAP vector using restriction enzymes SalI and NotI, and inserted into a vector containing neomycin resistance. Particularly, the NF-KB/SV40/SEAP cassette was inserted into pGFP-1 (Clontech), replacing the GFP gene, after restricting pGFP-I with SalI and NotI.

[1248] Once NF-KB/SV40/SEAP/Neo vector is created, stable Jurkat T-cells are created and maintained according to the protocol described in Example 32. Similarly, the method for assaying supernatants with these stable Jurkat T-cells is also described in Example 32. As a positive control, exogenous TNF alpha (0.1,1, 10 ng) is added to wells H9, H10, and H11, with a 5-10 fold activation typically observed.

### Example 36

### Assay for SEAP Activity

[1249] As a reporter molecule for the assays described in Examples 32-35, SEAP activity is assayed using the Tropix Phospho-light Kit (Cat. BP-400) according to the following general procedure. The Tropix Phospho-light Kit supplies the Dilution, Assay, and Reaction Buffers used below.

[1250] Prime a dispenser with the 2.5× Dilution Buffer and dispense 15 ul of 2.5× dilution buffer into Optiplates containing 35 ul of a supernatant. Seal the plates with a plastic sealer and incubate at 65 degree C. for 30 min. Separate the Optiplates to avoid uneven heating.

[1251] Cool the samples to room temperature for 15 minutes. Empty the dispenser and prime with the Assay Buffer. Add 50 ml Assay Buffer and incubate at room temperature 5 min. Empty the dispenser and prime with the Reaction Buffer (see the Table below). Add 50 ul Reaction Buffer and incubate at room temperature for 20 minutes. Since the intensity of the chemiluminescent signal is time dependent, and it takes about 10 minutes to read 5 plates on a luminometer, thus one should treat 5 plates at each time and start the second set 10 minutes later.

[1252] Read the relative light unit in the luminometer. Set H12 as blank, and print the results. An increase in chemiluminescence indicates reporter activity.

Reaction Buffer Formulation:

| # of plates | Rxn buffer diluent (ml) | CSPD (ml) |
|---|---|---|
| 10 | 60 | 3 |
| 11 | 65 | 3.25 |
| 12 | 70 | 3.5 |
| 13 | 75 | 3.75 |
| 14 | 80 | 4 |
| 15 | 85 | 4.25 |
| 16 | 90 | 4.5 |
| 17 | 95 | 4.75 |
| 18 | 100 | 5 |
| 19 | 105 | 5.25 |
| 20 | 110 | 5.5 |
| 21 | 115 | 5.75 |
| 22 | 120 | 6 |
| 23 | 125 | 6.25 |
| 24 | 130 | 6.5 |
| 25 | 135 | 6.75 |
| 26 | 140 | 7 |
| 27 | 145 | 7.25 |
| 28 | 150 | 7.5 |
| 29 | 155 | 7.75 |
| 30 | 160 | 8 |
| 31 | 165 | 8.25 |
| 32 | 170 | 8.5 |
| 33 | 175 | 8.75 |
| 34 | 180 | 9 |
| 35 | 185 | 9.25 |
| 36 | 190 | 9.5 |
| 37 | 195 | 9.75 |
| 38 | 200 | 10 |
| 39 | 205 | 10.25 |
| 40 | 210 | 10.5 |
| 41 | 215 | 10.75 |
| 42 | 220 | 11 |
| 43 | 225 | 11.25 |
| 44 | 230 | 11.5 |
| 45 | 235 | 11.75 |
| 46 | 240 | 12 |
| 47 | 245 | 12.25 |
| 48 | 250 | 12.5 |
| 49 | 255 | 12.75 |
| 50 | 260 | 13 |

### Example 37

### High-Throughput Screening Assay Identifying Changes in Small Molecule Concentration and Membrane Permeability

[1253] Binding of a ligand to a receptor is known to alter intracellular levels of small molecules, such as calcium, potassium, sodium, and pH, as well as alter membrane potential. These alterations can be measured in an assay to identify supernatants which bind to receptors of a particular cell. Although the following protocol describes an assay for calcium, this protocol can easily be modified to detect changes in potassium, sodium, pH, membrane potential, or any other small molecule which is detectable by a fluorescent probe.

[1254] The following assay uses Fluorometric Imaging Plate Reader (“FLIPR”) to measure changes in fluorescent molecules (Molecular Probes) that bind small molecules. Clearly, any fluorescent molecule detecting a small molecule can be used instead of the calcium fluorescent molecule, fluo-4 (Molecular Probes, Inc.; catalog no. F-14202), used here.

[1255] For adherent cells, seed the cells at 10,000-20,000 cells/well in a Co-star black 96-well plate with clear bottom. The plate is incubated in a CO₂ incubator for 20 hours. The adherent cells are washed two times in Biotek washer with 200 ul of HBSS (Hank's Balanced Salt Solution) leaving 100 ul of buffer after the final wash.

[1256] A stock solution of 1 mg/ml fluo-4 is made in 10% pluronic acid DMSO. To load the cells with fluo-4 , 50 ul of 12 ug/ml fluo-4 is added to each well. The plate is incubated at 37 degrees C. in a CO₂ incubator for 60 min. The plate is washed four times in the Biotek washer with HBSS leaving 100 ul of buffer.

[1257] For non-adherent cells, the cells are spun down from culture media. Cells are re-suspended to 2-5×10⁶ cells/ml with HBSS in a 50-ml conical tube. 4 ul of 1 mg/ml fluo-4 solution in 10% pluronic acid DMSO is added to each ml of cell suspension. The tube is then placed in a 37 degrees C. water bath for 30-60 min. The cells are washed twice with HBSS, resuspended to 1×10⁶ cells/ml, and dispensed into a microplate, 100 ul/well. The plate is centrifuged at 1000 rpm for 5 min. The plate is then washed once in Denley Cell Wash with 200 ul, followed by an aspiration step to 100 ul final volume.

[1258] For a non-cell based assay, each well contains a fluorescent molecule, such as fluo-4. The supernatant is added to the well, and a change in fluorescence is detected.

[1259] To measure the fluorescence of intracellular calcium, the FLIPR is set for the following parameters: (1) System gain is 300-800 mW; (2) Exposure time is 0.4 second; (3) Camera F/stop is F/2; (4) Excitation is 488 nm; (5) Emission is 530 nm; and (6) Sample addition is 50 ul. Increased emission at 530 nm indicates an extracellular signaling event caused by the a molecule, either polypeptide of the present invention or a molecule induced by polypeptide of the present invention, which has resulted in an increase in the intracellular Ca⁺⁺ concentration.

### Example 38

### High-Throughput Screening Assay Identifying Tyrosine Kinase Activity

[1260] The Protein Tyrosine Kinases (PTK) represent a diverse group of transmembrane and cytoplasmic kinases. Within the Receptor Protein Tyrosine Kinase RPTK) group are receptors for a range of mitogenic and metabolic growth factors including the PDGF, FGF, EGF, NGF, HGF and Insulin receptor subfamilies. In addition there are a large family of RPTKs for which the corresponding ligand is unknown. Ligands for RPTKs include mainly secreted small proteins, but also membrane-bound and extracellular matrix proteins.

[1261] Activation of RPTK by ligands involves ligand-mediated receptor dimerization, resulting in transphosphorylation of the receptor subunits and activation of the cytoplasmic tyrosine kinases. The cytoplasmic tyrosine kinases include receptor associated tyrosine kinases of the src-family (e.g., src, yes, lck, lyn, fyn) and non-receptor linked and cytosolic protein tyrosine kinases, such as the Jak family, members of which mediate signal transduction triggered by the cytokine superfamily of receptors (e.g., the Interleukins, Interferons, GM-CSF, and Leptin).

[1262] Because of the wide range of known factors capable of stimulating tyrosine kinase activity, identifying whether polypeptide of the present invention or a molecule induced by polypeptide of the present invention is capable of activating tyrosine kinase signal transduction pathways is of interest. Therefore, the following protocol is designed to identify such molecules capable of activating the tyrosine kinase signal transduction pathways.

[1263] Seed target cells (e.g., primary keratinocytes) at a density of approximately 25,000 cells per well in a 96 well Loprodyne Silent Screen Plates purchased from Nalge Nunc (Naperville, Ill.). The plates are sterilized with two 30 minute rinses with 100% ethanol, rinsed with water and dried overnight. Some plates are coated for 2 hr with 100 ml of cell culture grade type I collagen (50 mg/ml), gelatin (2%) or polylysine (50 mg/ml), all of which can be purchased from Sigma Chemicals (St. Louis, Mo.) or 10% Matrigel purchased from Becton Dickinson (Bedford, Mass.), or calf serum, rinsed with PBS and stored at 4 degree C. Cell growth on these plates is assayed by seeding 5,000 cells/well in growth medium and indirect quantitation of cell number through use of alamarBlue as described by the manufacturer Alamar Biosciences, Inc. (Sacramento, Calif.) after 48 hr. Falcon plate covers #3071 from Becton Dickinson (Bedford, Mass.) are used to cover the Loprodyne Silent Screen Plates. Falcon Microtest III cell culture plates can also be used in some proliferation experiments.

[1264] To prepare extracts, A431 cells are seeded onto the nylon membranes of Loprodyne plates (20,000/200 ml/well) and cultured overnight in complete medium. Cells are quiesced by incubation in serum-free basal medium for 24 hr. After 5-20 minutes treatment with EGF (60 ng/ml) or 50 ul of the supernatant produced in Example 30, the medium was removed and 100 ml of extraction buffer ((20 mM HEPES pH 7.5, 0.15 M NaCl, 1% Triton X-100, 0.1% SDS, 2 mM Na3VO4, 2 mM Na4P207 and a cocktail of protease inhibitors (#1836170) obtained from Boeheringer Mannheim (Indianapolis, Ind.)) is added to each well and the plate is shaken on a rotating shaker for 5 minutes at 4° C. The plate is then placed in a vacuum transfer manifold and the extract filtered through the 0.45 mm membrane bottoms of each well using house vacuum. Extracts are collected in a 96-well catch/assay plate in the bottom of the vacuum manifold and immediately placed on ice. To obtain extracts clarified by centrifugation, the content of each well, after detergent solubilization for 5 minutes, is removed and centrifuged for 15 minutes at 4 degree C. at 16,000× g.

[1265] Test the filtered extracts for levels of tyrosine kinase activity. Although many methods of detecting tyrosine kinase activity are known, one method is described here.

[1266] Generally, the tyrosine kinase activity of a supernatant is evaluated by determining its ability to phosphorylate a tyrosine residue on a specific substrate (a biotinylated peptide). Biotinylated peptides that can be used for this purpose include PSK1 (corresponding to amino acids 6-20 of the cell division kinase cdc2-p34) and PSK2 (corresponding to amino acids 1-17 of gastrin). Both peptides are substrates for a range of tyrosine kinases and are available from Boehringer Mannheim.

[1267] The tyrosine kinase reaction is set up by adding the following components in order. First, add 10 ul of 5uM Biotinylated Peptide, then 10 ul ATP/Mg₂+(5 mM ATP/50 mM MgCl₂), then 10 ul of 5× Assay Buffer (40 mM imidazole hydrochloride, pH 7.3, 40 mM beta-glycerophosphate, 1 mM EGTA, 100 mM MgCl₂, 5 mM MnCl₂, 0.5 mg/ml BSA), then 5 ul of Sodium Vanadate (1 mM), and then 5 ul of water. Mix the components gently and preincubate the reaction mix at 30 degree C. for 2 min. Initial the reaction by adding 10 ul of the control enzyme or the filtered supernatant.

[1268] The tyrosine kinase assay reaction is then terminated by adding 10 ul of 120 mm EDTA and place the reactions on ice.

[1269] Tyrosine kinase activity is determined by transferring 50 ul aliquot of reaction mixture to a microtiter plate (MTP) module and incubating at 37 degree C. for 20 min. This allows the streptavidin coated 96 well plate to associate with the biotinylated peptide. Wash the MTP module with 300 ul/well of PBS four times. Next add 75 ul of anti-phospotyrosine antibody conjugated to horse radish peroxidase (anti-P-Tyr-POD(0.5u/ml)) to each well and incubate at 37 degree C. for one hour. Wash the well as above.

[1270] Next add 100 ul of peroxidase substrate solution (Boehringer Mannheim) and incubate at room temperature for at least 5 mins (up to 30 min). Measure the absorbance of the sample at 405 nm by using ELISA reader. The level of bound peroxidase activity is quantitated using an ELISA reader and reflects the level of tyrosine kinase activity.

### Example 39

### High-Throughput Screening Assay Identifying Phosphorylation Activity

[1271] As a potential alternative and/or complement to the assay of protein tyrosine kinase activity described in Example 38, an assay which detects activation (phosphorylation) of major intracellular signal transduction intermediates can also be used. For example, as described below one particular assay can detect tyrosine phosphorylation of the Erk-1 and Erk-2 kinases. However, phosphorylation of other molecules, such as Raf, JNK, p38 MAP, Map kinase kinase (MEK), MEK kinase, Src, Muscle specific kinase (MuSK), IRAK, Tec, and Janus, as well as any other phosphoserine, phosphotyrosine, or phosphothreonine molecule, can be detected by substituting these molecules for Erk-1 or Erk-2 in the following assay.

[1272] Specifically, assay plates are made by coating the wells of a 96-well ELISA plate with 0.1 ml of protein G (1 ug/ml) for 2 hr at room temp, (RT). The plates are then rinsed with PBS and blocked with 3% BSA/PBS for 1 hr at RT. The protein G plates are then treated with 2 commercial monoclonal antibodies (100 ng/well) against Erk-1 and Erk-2 (1 hr at RT) (Santa Cruz Biotechnology). (To detect other molecules, this step can easily be modified by substituting a monoclonal antibody detecting any of the above described molecules.) After 3-5 rinses with PBS, the plates are stored at 4 degree C. until use.

[1273] A43 1 cells are seeded at 20,000/well in a 96-well Loprodyne filterplate and cultured overnight in growth medium. The cells are then starved for 48 hr in basal medium (DMEM) and then treated with EGF (6 ng/well) or 50 ul of the supernatants obtained in Example 30 for 5-20 minutes. The cells are then solubilized and extracts filtered directly into the assay plate.

[1274] After incubation with the extract for 1 hr at RT, the wells are again rinsed. As a positive control, a commercial preparation of MAP kinase (10 ng/well) is used in place of A431 extract. Plates are then treated with a commercial polyclonal (rabbit) antibody (1 ug/ml) which specifically recognizes the phosphorylated epitope of the Erk-1 and Erk-2 kinases (1 hr at RT). This antibody is biotinylated by standard procedures. The bound polyclonal antibody is then quantitated by successive incubations with Europium-streptavidin and Europium fluorescence enhancing reagent in the Wallac DELFIA instrument (time-resolved fluorescence). An increased fluorescent signal over background indicates a phosphorylation by polypeptide of the present invention or a molecule induced by polypeptide of the present invention.

### Example 40

### Assay for the Stimulation of Bone Marrow CD34+ Cell Proliferation

[1275] This assay is based on the ability of human CD34+to proliferate in the presence of hematopoietic growth factors and evaluates the ability of isolated polypeptides expressed in mammalian cells to stimulate proliferation of CD34+ cells.

[1276] It has been previously shown that most mature precursors will respond to only a single signal. More immature precursors require at least two signals to respond. Therefore, to test the effect of polypeptides on hematopoietic activity of a wide range of progenitor cells, the assay contains a given polypeptide in the presence or absence of other hematopoietic growth factors. Isolated cells are cultured for 5 days in the presence of Stem Cell Factor (SCF) in combination with tested sample. SCF alone has a very limited effect on the proliferation of bone marrow (BM) cells, acting in such conditions only as a “survival” factor. However, combined with any factor exhibiting stimulatory effect on these cells (e.g., IL-3), SCF will cause a synergistic effect. Therefore, if the tested polypeptide has a stimulatory effect on hematopoietic progenitors, such activity can be easily detected. Since normal BM cells have a low level of cycling cells, it is likely that any inhibitory effect of a given polypeptide, or agonists or antagonists thereof, might not be detected. Accordingly, assays for an inhibitory effect on progenitors is preferably tested in cells that are first subjected to in vitro stimulation with SCF+IL+3, and then contacted with the compound that is being evaluated for inhibition of such induced proliferation.

[1277] Briefly, CD34+cells are isolated using methods known in the art. The cells are thawed and resuspended in medium (QBSF 60 serum-free medium with 1% L-glutamine (500 ml) Quality Biological, Inc., Gaithersburg, Md. Cat# 160-204-101). After several gentle centrifugation steps at 200× g, cells are allowed to rest for one hour. The cell count is adjusted to 2.5×10⁵ cells/ml. During this time, 100 μl of sterile water is added to the peripheral wells of a 96-well plate. The cytokines that can be tested with a given polypeptide in this assay is rhSCF (R&D Systems, Minneapolis, Minn., Cat# 255-SC) at 50 ng/ml alone and in combination with rhSCF and rhIL-3 (R&D Systems, Minneapolis, Minn., Cat# 203-ML) at 30 ng/ml. After one hour, 10 μl of prepared cytokines, 50 μl of the supernatants prepared in Example 30 (supernatants at 1:2 dilution =50 μl) and 20 μl of diluted cells are added to the media which is already present in the wells to allow for a final total volume of 100 μl. The plates are then placed in a 37° C./5% CO₂ incubator for five days.

[1278] Eighteen hours before the assay is harvested, 0.5 μCi/well of [3H] Thymidine is added in a 10 μl volume to each well to determine the proliferation rate. The experiment is terminated by harvesting the cells from each 96-well plate to a filtermat using the Tomtec Harvester 96. After harvesting, the filtermats are dried, trimmed and placed into OmniFilter assemblies consisting of one OmniFilter plate and one OmniFilter Tray. 60 μl Microscint is added to each well and the plate sealed with TopSeal-A press-on sealing film A bar code 15 sticker is affixed to the first plate for counting. The sealed plates are then loaded and the level of radioactivity determined via the Packard Top Count and the printed data collected for analysis. The level of radioactivity reflects the amount of cell proliferation.

[1279] The studies described in this example test the activity of a given polypeptide to stimulate bone marrow CD34+ cell proliferation. One skilled in the art could easily modify the exemplified studies to test the activity of polynucleotides (e.g., gene therapy), antibodies, agonists, and/or antagonists and fragments and variants thereof. As a nonlimiting example, potential antagonists tested in this assay would be expected to inhibit cell proliferation in the presence of cytokines and/or to increase the inhibition of cell proliferation in the presence of cytokines and a given polypeptide. In contrast, potential agonists tested in this assay would be expected to enhance cell proliferation and/or to decrease the inhibition of cell proliferation in the presence of cytokines and a given polypeptide.

[1280] The ability of a gene to stimulate the proliferation of bone marrow CD34+ cells indicates that polynucleotides and polypeptides corresponding to the gene are useful for the diagnosis and treatment of disorders affecting the immune system and hematopoiesis. Representative uses are described in the “Immune Activity” and “Infectious Disease” sections above, and elsewhere herein.

### Example 41

### Assay for Extracellular Matrix Enhanced Cell Response (EMECR)

[1281] The objective of the Extracellular Matrix Enhanced Cell Response (EMECR) assay is to identify gene products (e.g., isolated polypeptides) that act on the hematopoietic stem cells in the context of the extracellular matrix (ECM) induced signal.

[1282] Cells respond to the regulatory factors in the context of signal(s) received from the surrounding microenvironment. For example, fibroblasts, and endothelial and epithelial stem cells fail to replicate in the absence of signals from the ECM. Hematopoietic stem cells can undergo self-renewal in the bone marrow, but not in in vitro suspension culture. The ability of stem cells to undergo self-renewal in vitro is dependent upon their interaction with the stromal cells and the ECM protein fibronectin (fn). Adhesion of cells to fn is mediated by the α₅.β₁ and α₄.β₁ integrin receptors, which are expressed by human and mouse hematopoietic stem cells. The factor(s) which integrate with the ECM environment and are responsible for stimulating stem cell self-renewal have not yet been identified. Discovery of such factors should be of great interest in gene therapy and bone marrow transplant applications

[1283] Briefly, polystyrene, non tissue culture treated, 96-well plates are coated with fn fragment at a coating concentration of 0.2 μg/cm². Mouse bone marrow cells are plated (1,000 cells/well ) in 0.2 ml of serum-free medium. Cells cultured in the presence of IL-3 (5 ng/ml )+SCF (50 ng/ml ) would serve as the positive control, conditions under which little self-renewal but pronounced differentiation of the stem cells is to be expected. Gene products of the invention (e.g., including, but not limited to, polynucleotides and polypeptides of the present invention, and supernatants produced in Example 30), are tested with appropriate negative controls in the presence and absence of SCF(5.0 ng/ml), where test factor supernatants represent 10% of the total assay volume. The plated cells are then allowed to grow by incubating in a low oxygen environment (5% CO₂, 7% O₂, and 88% N₂) tissue culture incubator for 7 days. The number of proliferating cells within the wells is then quantitated by measuring thymidine incorporation into cellular DNA. Verification of the positive hits in the assay will require phenotypic characterization of the cells, which can be accomplished by scaling up of the culture system and using appropriate antibody reagents against cell surface antigens and FACScan.

[1284] One skilled in the art could easily modify the exemplified studies to test the activity of polynucleotides (e.g., gene therapy), antibodies, agonists, and/or antagonists and fragments and variants thereof.

[1285] If a particular polypeptide of the present invention is found to be a stimulator of hematopoietic progenitors, polynucleotides and polypeptides corresponding to the gene encoding said polypeptide may be useful for the diagnosis and treatment of disorders affecting the immune system and hematopoiesis. Representative uses are described in the “Immune Activity” and “Infectious Disease” sections above, and elsewhere herein. The gene product may also be useful in the expansion of stem cells and committed progenitors of various blood lineages, and in the differentiation and/or proliferation of various cell types.

[1286] Additionally, the polynucleotides and/or polypeptides of the gene of interest and/or agonists and/or antagonists thereof, may also be employed to inhibit the proliferation and differentiation of hematopoietic cells and therefore may be employed to protect bone marrow stem cells from chemotherapeutic agents during chemotherapy. This antiproliferative effect may allow administration of higher doses of chemotherapeutic agents and, therefore, more effective chemotherapeutic treatment.

[1287] Moreover, polynucleotides and polypeptides corresponding to the gene of interest may also be useful for the treatment and diagnosis of hematopoietic related disorders such as, for example, anemia, pancytopenia, leukopenia, thrombocytopenia or leukemia since stromal cells are important in the production of cells of hematopoietic lineages. The uses include bone marrow cell ex-vivo culture, bone marrow transplantation, bone marrow reconstitution, radiotherapy or chemotherapy of neoplasia.

### Example 42

### Human Dermal Fibroblast and Aortic Smooth Muscle Cell Proliferation

[1288] The polypeptide of interest is added to cultures of normal human dermal fibroblasts (NHDF) and human aortic smooth muscle cells (AOSMC) and two co-assays are performed with each sample. The first assay examines the effect of the polypeptide of interest on the proliferation of normal human dermal fibroblasts (NHDF) or aortic smooth muscle cells (AoSMC). Aberrant growth of fibroblasts or smooth muscle cells is a part of several pathological processes, including fibrosis, and restenosis. The second assay examines IL6 production by both NHDF and SMC. IL6 production is an indication of functional activation. Activated cells will have increased production of a number of cytokines and other factors, which can result in a proinflammatory or immunomodulatory outcome. Assays are run with and without co-TNFa stimulation, in order to check for costimulatory or inhibitory activity.

[1289] Briefly, on day 1, 96-well black plates are set up with 1000 cells/well (NHDF) or 2000 cells/well (AoSMC) in 100 μl culture media. NHDF culture media contains: Clonetics FB basal media, 1 mg/ml hFGF, 5 mg/ml insulin, 50 mg/ml gentamycin, 2% FBS, while AoSMC culture media contains Clonetics SM basal media, 0.5 μg/ml hEGF, 5 mg/ml insulin, 1 mg/ml hFGF, 50 mg/ml gentamycin, 50 μg/ml Amphotericin B, 5% FBS. After incubation at 37° C. for at least 4-5 hours culture media is aspirated and replaced with growth arrest media. Growth arrest media for NHDF contains fibroblast basal media, 50 mg/ml gentamycin, 2% FBS, while growth arrest media for AoSMC contains SM basal media, 50 mg/ml gentamycin, 50 μg/ml Amphotericin B, 0.4% FBS. Incubate at 37° C. until day 2.

[1290] On day 2, serial dilutions and templates of the polypeptide of interest are designed such that they always include media controls and known-protein controls. For both stimulation and inhibition experiments, proteins are diluted in growth arrest media. For inhibition experiments, TNFa is added to a final concentration of 2 ng/ml (NHDF) or 5 ng/ml (AoSMC). Add ⅓ vol media containing controls or polypeptides of the present invention and incubate at 37 degrees C./5% CO₂ until day 5.

[1291] Transfer 60 μl from each well to another labeled 96-well plate, cover with a plate-sealer, and store at 4 degrees C. until Day 6 (for IL6 ELISA). To the remaining 100 μl in the cell culture plate, aseptically add Alamar Blue in an amount equal to 10% of the culture volume (10 μl). Return plates to incubator for 3 to 4 hours. Then measure fluorescence with excitation at 530 nm and emission at 590 nm using the CytoFluor. This yields the growth stimulation/inhibition data.

[1292] On day 5, the IL6 ELISA is performed by coating a 96 well plate with 50-100 ul/well of Anti-Human IL6 Monoclonal antibody diluted in PBS, pH 7.4, incubate ON at room temperature.

[1293] On day 6, empty the plates into the sink and blot on paper towels. Prepare Assay Buffer containing PBS with 4% BSA. Block the plates with 200 μl/well of Pierce Super Block blocking buffer in PBS for 1-2 hr and then wash plates with wash buffer (PBS, 0.05% Tween-20). Blot plates on paper towels. Then add 50 μl/well of diluted Anti-Human IL-6 Monoclonal, Biotin-labeled antibody at 0.50 mg/ml. Make dilutions of IL-6 stock in media (30, 10, 3, 1, 0.3, 0 ng/ml). Add duplicate samples to top row of plate. Cover the plates and incubate for 2 hours at RT on shaker.

[1294] Plates are washed with wash buffer and blotted on paper towels. Dilute EU-labeled Streptavidin 1:1000 in Assay buffer, and add 100 μl/well. Cover the plate and incubate 1 h at RT. Plates are again washed with wash buffer and blotted on paper towels.

[1295] Add 100 μl/well of Enhancement Solution. Shake for 5 minutes. Read the plate on the Wallac DELFIA Fluorometer. Readings from triplicate samples in each assay were tabulated and averaged.

[1296] A positive result in this assay suggests AoSMC cell proliferation and that the polypeptide of the present invention may be involved in dermal fibroblast proliferation and/or smooth muscle cell proliferation. A positive result also suggests many potential uses of polypeptides, polynucleotides, agonists and/or antagonists of the polynucleotide/polypeptide of the present invention which gives a positive result. For example, inflammation and immune responses, wound healing, and angiogenesis, as detailed throughout this specification. Particularly, polypeptides of the present invention and polynucleotides of the present invention may be used in wound healing and dermal regeneration, as well as the promotion of vasculogenesis, both of the blood vessels and lymphatics. The growth of vessels can be used in the treatment of, for example, cardiovascular diseases. Additionally, antagonists of polypeptides and polynucleotides of the invention may be useful in treating diseases, disorders, and/or conditions which involve angiogenesis by acting as an anti-vascular agent (e.g., anti-angiogenesis). These diseases, disorders, and/or conditions are known in the art and/or are described herein, such as, for example, malignancies, solid tumors, benign tumors, for example hemangiomas, acoustic neuromas, neurofibromas, trachomas, and pyogenic granulomas; artheroscleric plaques; ocular angiogenic diseases, for example, diabetic retinopathy, retinopathy of prematurity, macular degeneration, corneal graft rejection, neovascular glaucoma, retrolental fibroplasia, rubeosis, retinoblastoma, uvietis and Pterygia (abnormal blood vessel growth) of the eye; rheumatoid arthritis; psoriasis; delayed wound healing; endometriosis; vasculogenesis; granulations; hypertrophic scars (keloids); nonunion fractures; scleroderma; trachoma; vascular adhesions; myocardial angiogenesis; coronary collaterals; cerebral collaterals; arteriovenous malformations; ischemic limb angiogenesis; Osler-Webber Syndrome; plaque neovascularization; telangiectasia; hemophiliac joints; angiofibroma; fibromuscular dysplasia; wound granulation; Crohn's disease; and atherosclerosis. Moreover, antagonists of polypeptides and polynucleotides of the invention may be useful in treating anti-hyperproliferative diseases and/or anti-inflammatory known in the art and/or described herein.

[1297] One skilled in the art could easily modify the exemplified studies to test the activity of polynucleotides (e.g., gene therapy), antibodies, agonists, and/or antagonists and fragments and variants thereof.

### Example 43

### Cellular Adhesion Molecule (CAM) Expression on Endothelial Cells

[1298] The recruitment of lymphocytes to areas of inflammation and angiogenesis involves specific receptor-ligand interactions between cell surface adhesion molecules (CAMs) on lymphocytes and the vascular endothelium. The adhesion process, in both normal and pathological settings, follows a multi-step cascade that involves intercellular adhesion molecule-1 (ICAM-1), vascular cell adhesion molecule-1 (VCAM-1), and endothelial leukocyte adhesion molecule-1 (E-selectin) expression on endothelial cells (EC). The expression of these molecules and others on the vascular endothelium determines the efficiency with which leukocytes may adhere to the local vasculature and extravasate into the local tissue during the development of an inflammatory response. The local concentration of cytokines and growth factor participate in the modulation of the expression of these CAMs.

[1299] Briefly, endothelial cells (e.g., Human Umbilical Vein Endothelial cells (HUVECs)) are grown in a standard 96 well plate to confluence, growth medium is removed from the cells and replaced with 100 μl of 199 Medium (10% fetal bovine serum (FBS)). Samples for testing and positive or negative controls are added to the plate in triplicate (in 10 μl volumes). Plates are then incubated at 37° C. for either 5 h (selectin and integrin expression) or 24 h (integrin expression only). Plates are aspirated to remove medium and 100 μl of 0.1% paraformaldehyde-PBS(with Ca++ and Mg++) is added to each well. Plates are held at 4° C. for 30 min. Fixative is removed from the wells and wells are washed 1× with PBS(+Ca,Mg)+0.5% BSA and drained. 10 μl of diluted primary antibody is added to the test and control wells. Anti-ICAM-1-Biotin, Anti-VCAM-1-Biotin and Anti-E-selectin-Biotin are used at a concentration of 10 μg/ml (1:10 dilution of 0.1 mg/ml stock antibody). Cells are incubated at 37° C. for 30 min. in a humidified environment. Wells are washed three times with PBS(+Ca,Mg)+0.5% BSA. 20 μl of diluted ExtrAvidin-Alkaline Phosphatase (1:5,000 dilution, referred to herein as the working dilution) are added to each well and incubated at 37° C. for 30 min. Wells are washed three times with PBS(+Ca,Mg)+0.5% BSA. Dissolve 1 tablet of p-Nitrophenol Phosphate pNPP per 5 ml of glycine buffer (pH 10.4). 100 μl of pNPP substrate in glycine buffer is added to each test well. Standard wells in triplicate are prepared from the working dilution of the ExtrAvidin-Alkaline Phosphotase in glycine buffer: 1:5,000 (10⁰)>10^{-0.5}>10⁻¹>10^{-1.5}0.5 μl of each dilution is added to triplicate wells and the resulting AP content in each well is 5.50 ng, 1.74 ng, 0.55 ng, 0.18 ng. 100 μl of pNNP reagent is then added to each of the standard wells. The plate is incubated at 37° C. for 4h. A volume of 50 μl of 3M NaOH is added to all wells. The plate is read on a plate reader at 405 nm using the background subtraction option on blank wells filled with glycine buffer only. Additionally, the template is set up to indicate the concentration of AP-conjugate in each standard well [5.50 ng; 1.74 ng; 0.55 ng; 0.18 ng]. Results are indicated as amount of bound AP-conjugate in each sample.

### Example 44

### Alamar Blue Endothelial Cells Proliferation Assay

[1300] This assay may be used to quantitatively determine protein mediated inhibition of bFGF-induced proliferation of Bovine Lymphatic Endothelial Cells (LECs), Bovine Aortic Endothelial Cells (BAECs) or Human Microvascular Uterine Myometrial Cells (UTMECs). This assay incorporates a fluorometric growth indicator based on detection of metabolic activity. A standard Alamar Blue Proliferation Assay is prepared in EGM-2MV with 10 ng/ml of bFGF added as a source of endothelial cell stimulation. This assay may be used with a variety of endothelial cells with slight changes in growth medium and cell concentration. Dilutions of the protein batches to be tested are diluted as appropriate. Serum-free medium (GIBCO SFM) without bFGF is used as a non-stimulated control and Angiostatin or TSP-1 are included as a known inhibitory controls.

[1301] Briefly, LEC, BAECs or UTMECs are seeded in growth media at a density of 5000 to 2000 cells/well in a 96 well plate and placed at 37degrees C. overnight. After the overnight incubation of the cells, the growth media is removed and replaced with GIBCO EC-SFM. The cells are treated with the appropriate dilutions of the protein of interest or control protein sample(s) (prepared in SFM ) in triplicate wells with additional bFGF to a concentration of 10 ng/ml. Once the cells have been treated with the samples, the plate(s) is/are placed back in the 37° C. incubator for three days. After three days 10 ml of stock alamar blue (Biosource Cat#DAL 1100) is added to each well and the plate(s) is/are placed back in the 37° C. incubator for four hours. The plate(s) are then read at 530 nm excitation and 590 nm emission using the CytoFluor fluorescence reader. Direct output is recorded in relative fluorescence units.

[1302] Alamar blue is an oxidation-reduction indicator that both fluoresces and changes color in response to chemical reduction of growth medium resulting from cell growth. As cells grow in culture, innate metabolic activity results in a chemical reduction of the immediate surrounding environment. Reduction related to growth causes the indicator to change from oxidized (non-fluorescent blue) form to reduced (fluorescent red) form (i.e., stimulated proliferation will produce a stronger signal and inhibited proliferation will produce a weaker signal and the total signal is proportional to the total number of cells as well as their metabolic activity). The background level of activity is observed with the starvation medium alone. This is compared to the output observed from the positive control samples (bFGF in growth medium) and protein dilutions.

### Example 45

### Detection of Inhibition of a Mixed Lymphocyte Reaction

[1303] This assay can be used to detect and evaluate inhibition of a Mixed Lymphocyte Reaction (MLR) by gene products (e.g., isolated polypeptides). Inhibition of a MLR may be due to a direct effect on cell proliferation and viability, modulation of costimulatory molecules on interacting cells, modulation of adhesiveness between lymphocytes and accessory cells, or modulation of cytokine production by accessory cells. Multiple cells may be targeted by these polypeptides since the peripheral blood mononuclear fraction used in this assay includes T, B and natural killer lymphocytes, as well as monocytes and dendritic cells.

[1304] Polypeptides of interest found to inhibit the MLR may find application in diseases associated with lymphocyte and monocyte activation or proliferation. These include, but are not limited to, diseases such as asthma, arthritis, diabetes, inflammatory skin conditions, psoriasis, eczema, systemic lupus erythematosus, multiple sclerosis, glomerulonephritis, inflammatory bowel disease, crohn's disease, ulcerative colitis, arteriosclerosis, cirrhosis, graft vs. host disease, host vs. graft disease, hepatitis, leukemia and lymphoma.

[1305] Briefly, PBMCs from human donors are purified by density gradient centrifugation using Lymphocyte Separation Medium (LSM®, density 1.0770 g/ml, Organon Teknika Corporation, West Chester, Pa.). PBMCs from two donors are adjusted to 2×10⁶ cells/ml in RPMI-1640 (Life Technologies, Grand Island, N.Y.) supplemented with 10% FCS and 2 mM glutamine. PBMCs from a third donor is adjusted to 2×10⁵ cells/ml. Fifty microliters of PBMCs from each donor is added to wells of a 96-well round bottom microtiter plate. Dilutions of test materials (50 μl) is added in triplicate to microtiter wells. Test samples (of the protein of interest) are added for final dilution of 1:4; rhuIL-2 (R&D Systems, Minneapolis, Minn., catalog number 202-IL) is added to a final concentration of 1 μg/ml; anti-CD4 mAb (R&D Systems, clone 34930.11, catalog number MAB379) is added to a final concentration of 10 μg/ml. Cells are cultured for 7-8 days at 37° C. in 5% CO₂, and 1 μC of [³H] thymidine is added to wells for the last 16 hrs of culture. Cells are harvested and thymidine incorporation determined using a Packard TopCount. Data is expressed as the mean and standard deviation of triplicate determinations.

[1306] Samples of the protein of interest are screened in separate experiments and compared to the negative control treatment, anti-CD4 mAb, which inhibits proliferation of lymphocytes and the positive control treatment, IL-2 (either as recombinant material or supernatant), which enhances proliferation of lymphocytes.

[1307] One skilled in the art could easily modify the exemplified studies to test the activity of polynucleotides (e.g., gene therapy), antibodies, agonists, and/or antagonists and fragments and variants thereof.

### Example 46

### Assays for Protease Activity

[1308] The following assay may be used to assess protease activity of the polypeptides of the invention.

[1309] Gelatin and casein zymography are performed essentially as described (Heusen et al., Anal. Biochem., 102:196-202 (1980); Wilson et al., Journal of Urology, 149:653-658 (1993)). Samples are run on 10% polyacryamide/0.1% SDS gels containing 1% gelain orcasein, soaked in 2.5% triton, at room temperature for 1 hour, and in 0.0M glycine, pH 8.3 at 37° C. 5 to 16 hours. After staining in amido black areas of proteolysis apear as clear areas agains the blue-black background. Trypsin (Sigma T8642) is used as a positive control.

[1310] Protease activity is also determined by monitoring the cleavage of n-a-benzoyl-L-arginine ethyl ester (BAEE) (Sigma B-4500. Reactions are set up in (25 mMNaPO₄, 1 mM EDTA, and 1 mM BAEE), pH 7.5. Samples are added and the change in adsorbance at 260 nm is monitored on the Beckman DU-6 spectrophotometer in the time-drive mode. Trypsin is used as a positive control.

[1311] Additional assays based upon the release of acid-soluble peptides from casein or hemoglobin measured as adsorbance at 280 nm or calorimetrically using the Folin method are performed as described in Bergmeyer, et al., Methods of Enzymatic Analysis, 5 (1984). Other assays involve the solubilization of chromogenic substrates (Ward, Applied Science, 251-317 (1983).

### Example 47

### Identifying Serine Protease Substrate Specificity

[1312] Methods known in the art or described herein may be used to determine the substrate specificity of the polypeptides of the present invention having serine protease activity. A preferred method of determining substrate specificity is by the use of positional scanning synthetic combinatorial libraries as described in GB 2 324 529 (incorporated herein in its entirety).

### Example 48

### Ligand Binding Assays

[1313] The following assay may be used to assess ligand binding activity of the polypeptides of the invention.

[1314] Ligand binding assays provide a direct method for ascertaining receptor pharmacology and are adaptable to a high throughput format. The purified ligand for a polypeptide is radiolabeled to high specific activity (50-2000 Ci/mmol) for binding studies. A determination is then made that the process of radiolabeling does not diminish the activity of the ligand towards its polypeptide. Assay conditions for buffers, ions, pH and other modulators such as nucleotides are optimized to establish a workable signal to noise ratio for both membrane and whole cell polypeptide sources. For these assays, specific polypeptide binding is defined as total associated radioactivity minus the radioactivity measured in the presence of an excess of unlabeled competing ligand. Where possible, more than one competing ligand is used to define residual nonspecific binding.

### Example 49

### Functional Assay in Xenopus Oocytes

[1315] Capped RNA transcripts from linearized plasmid templates encoding the polypeptides of the invention are synthesized in vitro with RNA polymerases in accordance with standard procedures. In vitro transcripts are suspended in water at a final concentration of 0.2 mg/ml. Ovarian lobes are removed from adult female toads, Stage V defolliculated oocytes are obtained, and RNA transcripts (10 ng/oocytc) are injected in a 50 ni bolus using a microinjection apparatus. Two electrode voltage clamps are used to measure the currents from individual Xenopus oocytes in response polypeptides and polypeptide agonist exposure. Recordings are made in Ca2+free Barth's medium at room temperature. The Xenopus system can be used to screen known ligands and tissue/cell extracts for activating ligands.

### Example 50

### Microphysiometric Assays

[1316] Activation of a wide variety of secondary messenger systems results in extrusion of small amounts of acid from a cell. The acid formed is largely as a result of the increased metabolic activity required to fuel the intracellular signaling process. The pH changes in the media surrounding the cell are very small but are detectable by the CYTOSENSOR microphysiometer (Molecular Devices Ltd., Menlo Park, Calif.). The CYTOSENSOR is thus capable of detecting the activation of polypeptide which is coupled to an energy utilizing intracellular signaling pathway.

### Example 51

### Extract/Cell Supernatant Screening

[1317] A large number of mammalian receptors exist for which there remains, as yet, no cognate activating ligand (agonist). Thus, active ligands for these receptors may not be included within the ligands banks as identified to date. Accordingly, the polypeptides of the invention can also be functionally screened (using calcium, cAMP, microphysiometer, oocyte electrophysiology, etc., functional screens) against tissue extracts to identify its natural ligands. Extracts that produce positive functional responses can be sequentially subfractionated until an activating ligand is isolated and identified.

### Example 52

### Calcium and cAMP Functional Assays

[1318] Seven transmembrane receptors which are expressed in HEK 293 cells have been shown to be coupled functionally to activation of PLC and calcium mobilization and/or cAMP stimulation or inhibition. Basal calcium levels in the HEK 293 cells in receptor-transfected or vector control cells were observed to be in the normal, 100 nM to 200 nM, range. HEK 293 cells expressing recombinant receptors are loaded with fura 2 and in a single day >150 selected ligands or tissue/cell extracts are evaluated for agonist induced calcium mobilization. Similarly, HEK 293 cells expressing recombinant receptors are evaluated for the stimulation or inhibition of cAMP production using standard cAMP quantitation assays. Agonists presenting a calcium transient or cAMP fluctuation are tested in vector control cells to determine if the response is unique to the transfected cells expressing receptor.

### Example 53

### A TP-Binding Assay

[1319] The following assay may be used to assess ATP-binding activity of polypeptides of the invention.

[1320] ATP-binding activity of the polypeptides of the invention may be detected using the ATP-binding assay described in U.S. Pat. No. 5,858,719, which is herein incorporated by reference in its entirety. Briefly, ATP-binding to polypeptides of the invention is measured via photoaffinity labeling with 8-azido-ATP in a competition assay. Reaction mixtures containing 1 mg/ml of the ABC transport protein of the present invention are incubated with varying concentrations of ATP, or the non-hydrolyzable ATP analog adenyl-5′-imidodiphosphate for 10 minutes at 4° C. A mixture of 8-azido-ATP (Sigma Chem. Corp., St. Louis, Mo.) plus 8-azido-AT? (32p ATP) (5 mCi/μmol, ICN, Irvine Calif.) is added to a final concentration of 100 μM and 0.5 ml aliquots are placed in the wells of a porcelain spot plate on ice. The plate is irradiated using a short wave 254 nm UV lamp at a distance of 2.5 cm from the plate for two one-minute intervals with a one-minute cooling interval in between. The reaction is stopped by addition of dithiothreitol to a final concentration of 2 mM. The incubations are subjected to SDS-PAGE electrophoresis, dried, and autoradiographed. Protein bands corresponding to the particular polypeptides of the invention are excised, and the radioactivity quantified. A decrease in radioactivity with increasing ATP or adenly-5′-imidodiphosphate provides a measure of ATP affinity to the polypeptides.

### Example 54

### Small Molecule Screening

[1321] This invention is particularly useful for screening therapeutic compounds by using the polypeptides of the invention, or binding fragments thereof, in any of a variety of drug screening techniques. The polypeptide or fragment employed in such a test may be affixed to a solid support, expressed on a cell surface, free in solution, or located intracellularly. One method of drug screening utilizes eukaryotic or prokaryotic host cells which are stably transformed with recombinant nucleic acids expressing the polypeptide or fragment. Drugs are screened against such transformed cells in competitive binding assays. One may measure, for example, the formulation of complexes between the agent being tested and polypeptide of the invention.

[1322] Thus, the present invention provides methods of screening for drugs or any other agents which affect activities mediated by the polypeptides of the invention. These methods comprise contacting such an agent with a polypeptide of the invention or fragment thereof and assaying for the presence of a complex between the agent and the polypeptide or fragment thereof, by methods well known in the art. In such a competitive binding assay, the agents to screen are typically labeled. Following incubation, free agent is separated from that present in bound form, and the amount of free or uncomplexed label is a measure of the ability of a particular agent to bind to the polypeptides of the invention.

[1323] Another technique for drug screening provides high throughput screening for compounds having suitable binding affinity to the polypeptides of the invention, and is described in great detail in European Patent Application 84/03564, published on Sep. 13, 1984, which is herein incorporated by reference in its entirety. Briefly stated, large numbers of different small molecule test compounds are synthesized on a solid substrate, such as plastic pins or some other surface. The test compounds are reacted with polypeptides of the invention and washed. Bound polypeptides are then detected by methods well known in the art. Purified polypeptides are coated directly onto plates for use in the aforementioned drug screening techniques. In addition, non-neutralizing antibodies may be used to capture the peptide and immobilize it on the solid support.

[1324] This invention also contemplates the use of competitive drug screening assays in which neutralizing antibodies capable of binding polypeptides of the invention specifically compete with a test compound for binding to the polypeptides or fragments thereof. In this manner, the antibodies are used to detect the presence of any peptide which shares one or more antigenic epitopes with a polypeptide of the invention.

### Example 55

### Phosphorylation Assay

[1325] In order to assay for phosphorylation activity of the polypeptides of the invention, a phosphorylation assay as described in U.S. Pat. No. 5,958,405 (which is herein incorporated by reference) is utilized. Briefly, phosphorylation activity may be measured by phosphorylation of a protein substrate using gamma-labeled ³²P-ATP and quantitation of the incorporated radioactivity using a gamma radioisotope counter. The polypeptides of the invention are incubated with the protein substrate, ³²P-ATP, and a kinase buffer. The ³²P incorporated into the substrate is then separated from free ³²P-ATP by electrophoresis, and the incorporated ³²P is counted and compared to a negative control. Radioactivity counts above the negative control are indicative of phosphorylation activity of the polypeptides of the invention.

### Example 56

### Detection of Phosphorylation Activity (Activation) of the Polypeptides of the Invention in the Presence of Polypeptide Ligands

[1326] Methods known in the art or described herein may be used to determine the phosphorylation activity of the polypeptides of the invention. A preferred method of determining phosphorylation activity is by the use of the tyrosine phosphorylation assay as described in U.S. Pat. No. 5,817,471 (incorporated herein by reference).

### Example 57

### Identification of Signal Transduction Proteins that Interact with Polypeptides of the Present Invention

[1327] The purified polypeptides of the invention are research tools for the identification, characterization and purification of additional signal transduction pathway proteins or receptor proteins. Briefly, labeled receptor PTK polypeptide is useful as a reagent for the purification of molecules with which it interacts. In one embodiment of affinity purification, receptor PTK polypeptide is covalently coupled to a chromatography column. Cell-free extract derived from putative target cells, such as carcinoma tissues, is passed over the column, and molecules with appropriate affinity bind to the receptor PTK polypeptides, or specific phosphotyrosine-recognition domains thereof. The receptor PTK polypeptide interacting protein-complex is recovered from the column, dissociated, and the recovered molecule subjected to N-terminal protein sequencing. This amino acid sequence is then used to identify the captured molecule or to design degenerate oligonucleotide probes for cloning the relevant gene from an appropriate cDNA library.

### Example 58

### IL-6 Bioassay

[1328] To test the proliferative effects of the polypeptides of the invention, the IL-6 Bioassay as described by Marz et al. is utilized (Proc. Natl. Acad. Sci., U.S.A., 95:3251-56 (1998), which is herein incorporated by reference). Briefly, IL-6 dependent B9 murine cells are washed three times in IL-6 free medium and plated at a concentration of 5,000 cells per well in 50 μl, and 50 μl of the IL-6-like polypeptide is added. After 68 hrs. at 37° C., the number of viable cells is measured by adding the tetrazolium salt thiazolyl blue (MTT) and incubating for a further 4 hrs. at 37° C. B9 cells are lysed by SDS and optical density is measured at 570 nm. Controls containing IL-6 (positive) and no cytokine (negative) are utilized. Enhanced proliferation in the test sample(s) relative to the negative control is indicative of proliferative effects mediated by polypeptides of the invention.

### Example 59

### Support of Chicken Embryo Neuron Survival

[1329] To test whether sympathetic neuronal cell viability is supported by polypeptides of the invention, the chicken embryo neuronal survival assay of Senaldi et al is utilized (Proc. Natl. Acad. Sci., U.S.A., 96:11458-63 (1998), which is herein incorporated by reference). Briefly, motor and sympathetic neurons are isolated from chicken embryos, resuspended in L15 medium (with 10% FCS, glucose, sodium selenite, progesterone, conalbumin, putrescine, and insulin; Life Technologies, Rockville, Md.) and Dulbecco's modified Eagles medium [with 10% FCS, glutamine, penicillin, and 25 mM Hepes buffer (pH 7.2); Life Technologies, Rockville, Md.], respectively, and incubated at 37° C. in 5% CO₂ in the presence of different concentrations of the purified IL-6-like polypeptide, as well as a negative control lacking any cytokine. After 3 days, neuron survival, is determined by evaluation of cellular morphology, and through the use of the calorimetric assay of Mosmann (Mossman, T., J. Immunol. Methods, 65:55-63 (1983)). Enhanced neuronal cell viability as compared to the controls lacking cytokine is indicative of the ability of the inventive purified IL-6-like polypeptide(s) to enhance the survival of neuronal cells.

### Example 60

### Assay for Phosphatase Activity

[1330] The following assay may be used to assess serine/threonine phosphatase (PTPase) activity of the polypeptides of the invention.

[1331] In order to assay for serine/threonine phosphatase (PTPase) activity, assays can be utilized which are widely known to those skilled in the art. For example, the serine/threonine phosphatase (PSPase) activity is measured using a PSPase assay kit from New England Biolabs, Inc. Myelin basic protein (MyBP), a substrate for PSPase, is phosphorylated on serine and threonine residues with cAMP-dependent Protein Kinase in the presence of [³²P]ATP. Protein serine/threonine phosphatase activity is then determined by measuring the release of inorganic phosphate from 32P-labeled MyBP.

### Example 61

### Interaction of Serine/Threonine Phosphatases with Other Proteins

[1332] The polypeptides of the invention with serine/threonine phosphatase activity as determined in Example 60 are research tools for the identification, characterization and purification of additional interacting proteins or receptor proteins, or other signal transduction pathway proteins. Briefly, labeled polypeptide(s) of the invention is useful as a reagent for the purification of molecules with which it interacts. In one embodiment of affinity purification, polypeptide of the invention is covalently coupled to a chromatography column. Cell-free extract derived from putative target cells, such as neural or liver cells, is passed over the column, and molecules with appropriate affinity bind to the polypeptides of the invention. The polypeptides of the invention complex is recovered from the column, dissociated, and the recovered molecule subjected to N-terminal protein sequencing. This amino acid sequence is then used to identify the captured molecule or to design degenerate oligonucleotide probes for cloning the relevant gene from an appropriate cDNA library.

### Example 62

### Assaying for Heparanase Activity

[1333] In order to assay for heparanase activity of the polypeptides of the invention, the heparanase assay described by Vlodavsky et al is utilized (Vlodavsky, I., et al., Nat. Med., 5:793-802 (1999)). Briefly, cell lysates, conditioned media or intact cells (1×10⁶ cells per 35-mm dish) are incubated for 18 hrs at 37° C., pH 6.2-6.6, with ³⁵S-labeled ECM or soluble ECM derived peak I proteoglycans. The incubation medium is centrifuged and the supernatant is analyzed by gel filtration on a Sepharose CL-6B column (0.9×30 cm). Fractions are eluted with PBS and their radioactivity is measured. Degradation fragments of heparan sulfate side chains are eluted from Sepharose 6B at 0.5<Kₐᵥ<0.8 (peak II). Each experiment is done at least three times. Degradation fragments corresponding to “peak II,” as described by Vlodavsky et al., is indicative of the activity of the polypeptides of the invention in cleaving heparan sulfate.

### Example 63

### Immobilization of Biomolecules

[1334] This example provides a method for the stabilization of polypeptides of the invention in non-host cell lipid bilayer constucts (see, e.g., Bieri et al., Nature Biotech 17:1105-1108 (1999), hereby incorporated by reference in its entirety herein) which can be adapted for the study of polypeptides of the invention in the various functional assays described above. Briefly, carbohydrate-specific chemistry for biotinylation is used to confine a biotin tag to the extracellular domain of the polypeptides of the invention, thus allowing uniform orientation upon immobilization. A 50 uM solution of polypeptides of the invention in washed membranes is incubated with 20 mM NaIO4 and 1.5 mg/ml (4 mM) BACH or 2 mg/ml (7.5 mM) biotin-hydrazide for 1 hr at room temperature (reaction volume, 150 ul). Then the sample is dialyzed (Pierce Slidealizer Cassett, 10 kDa cutoff; Pierce Chemical Co., Rockford Ill.) at 4C first for 5 h, exchanging the buffer after each hour, and finally for 12 h against 500 ml buffer R (0.15 M NaCI, 1 mM MgCl2, 10 mM sodium phosphate, pH 7). Just before addition into a cuvette, the sample is diluted 1:5 in buffer ROG50 (Buffer R supplemented with 50 mM octylglucoside).

### Example 64

### TAQMAN

[1335] Quantitative PCR (QPCR). Total RNA from cells in culture are extracted by Trizol separation as recommended by the supplier (LifeTechnologies). (Total RNA is treated with DNase I (Life Technologies) to remove any contaminating genomic DNA before reverse transcription.) Total RNA (50 ng) is used in a one-step, 50 ul, RT-QPCR, consisting of Taqman Buffer A (Perkin-Elmer; 50 mM KCl/10 mM Tris, pH 8.3), 5.5 mM MgCl₂, 240 μM each dNTP, 0.4 units RNase inhibitor(Promega), 8% glycerol, 0.012% Tween-20, 0.05% gelatin, 0.3uM primers, 0.1uM probe, 0.025units Amplitaq Gold (Perkin-Elmer) and 2.5 units Superscript II reverse transcriptase (Life Technologies). As a control for genomic contamination, parallel reactions are setup without reverse transcriptase. The relative abundance of (unknown) and 18S RNAs are assessed by using the Applied Biosystems Prism 7700 Sequence Detection System (Livak, K. J., Flood, S. J., Marmaro, J., Giusti, W. & Deetz, K. (1995) PCR Methods Appl. 4, 357-362). Reactions are carried out at 48° C. for 30 min, 95° C. for 10 min, followed by 40 cycles of 95° C. for 15s, 60° C. for 1 min. Reactions are performed in triplicate.

[1336] Primers (f & r) and FRET probes sets are designed using Primer Express Software (Perkin-Elmer). Probes are labeled at the 5′-end with the reporter dye 6-FAM and on the 3′-end with the quencher dye TAMRA (Biosource International, Camarillo, Calif. or Perkin-Elmer).

### Example 65

### Assays for Metalloproteinase Activity

[1337] Metalloproteinases (EC 3.4.24.-) are peptide hydrolases which use metal ions, such as Zn²⁺, as the catalytic mechanism. Metalloproteinase activity of polypeptides of the present invention can be assayed according to the following methods.

[1338] Proteolysis of alpha-2-macroglobulin

[1339] To confirm protease activity, purified polypeptides of the invention are mixed with the substrate alpha-2-macroglobulin (0.2 unit/ml; Boehringer Mannheim, Germany) in 1× assay buffer (50 mM HEPES, pH 7.5, 0.2 M NaCl, 10 mM CaCl₂, 25 μM ZnCl₂ and 0.05% Brij-35) and incubated at 37° C. for 1-5 days. Trypsin is used as positive control. Negative controls contain only alpha-2-macroglobulin in assay buffer. The samples are collected and boiled in SDS-PAGE sample buffer containing 5% 2-mercaptoethanol for 5-min, then loaded onto 8% SDS-polyacrylamide gel. After electrophoresis the proteins are visualized by silver staining. Proteolysis is evident by the appearance of lower molecular weight bands as compared to the negative control.

[1340] Inhibition of alpha-2-macroglobulin Proteolysis by Inhibitors of Metalloproteinases

[1341] Known metalloproteinase inhibitors (metal chelators (EDTA, EGTA, AND HgCl₂), peptide metalloproteinase inhibitors (TIMP-1 and TIMP-2), and commercial small molecule MMP inhibitors) are used to characterize the proteolytic activity of polypeptides of the invention. The three synthetic MMP inhibitors used are: MMP inhibitor I, [IC₅₀=1.0 μM against MMP-1 and MMP-8; IC₅₀=30 μM against MMP-9; IC₅₀=150 μM against MMP-3]; MMP-3 (stromelysin-1) inhibitor I [IC₅₀=5 μM against MMP-3], and MMP-3 inhibitor II [Kᵢ=130 nM against MMP-3]; inhibitors available through Calbiochem, catalog #444250, 444218, and 444225, respectively). Briefly, different concentrations of the small molecule MMP inhibitors are mixed with purified polypeptides of the invention (50 μg/ml) in 22.9 μl of 1× HEPES buffer (50 mM HEPES, pH 7.5, 0.2 M NaCl, 10 mM CaCl₂, 25 μM ZnCl₂ and 0.05% Brij-35) and incubated at room temperature (24° C.) for 2-hr, then 7.1 μl of substrate alpha-2-macroglobulin (0.2 unit/ml) is added and incubated at 37° C. for 20-hr. The reactions are stopped by adding 4× sample buffer and boiled immediately for 5 minutes. After SDS-PAGE, the protein bands are visualized by silver stain.

[1342] Synthetic Fluorogenic Peptide Substrates Cleavage Assay

[1343] The substrate specificity for polypeptides of the invention with demonstrated metalloproteinase activity can be determined using synthetic fluorogenic peptide substrates (purchased from BACHEM Bioscience Inc). Test substrates include, M-1985, M-2225, M-2105, M-2110, and M-2255. The first four are MMP substrates and the last one is a substrate of tumor necrosis factor-α (TNF-α) converting enzyme (TACE). All the substrates are prepared in 1:1 dimethyl sulfoxide (DMSO) and water. The stock solutions are 50-500 μM. Fluorescent assays are performed by using a Perkin Elmer LS 50B luminescence spectrometer equipped with a constant temperature water bath. The excitation λ is 328 nm and the emission λ is 393 nm. Briefly, the assay is carried out by incubating 176 μl 1× HEPES buffer (0.2 M NaCl, 10 mM CaCl₂, 0.05% Brij-35 and 50 mM HEPES, pH 7.5) with 4 μl of substrate solution (50 μM) at 25° C. for 15 minutes, and then adding 20 μl of a purified potypeptide of the invention into the assay cuvett. The final concentration of substrate is 1 μM. Initial hydrolysis rates are monitored for 30-min.

### Example 66

### Characterization of the cDNA Contained in a Deposited Plasmid

[1344] The size of the cDNA insert contained in a deposited plasmid may be routinely determined using techniques known in the art, such as PCR amplification using synthetic primers hybridizable to the 3′ and 5′ ends of the cDNA sequence. For example, two primers of 17-30 nucleotides derived from each end of the cDNA (i.e., hybridizable to the absolute 5′ nucleotide or the 3′ nucleotide end of the sequence of SEQ ID NO:X, respectively) are synthesized and used to amplify the cDNA using the deposited cDNA plasmid as a template. The polymerase chain reaction is carried out under routine conditions, for instance, in 25 ul of reaction mixture with 0.5 ug of the above cDNA template. A convenient reaction mixture is 1.5-5 mM MgCl₂, 0.01% (w/v) gelatin, 20 uM each of dATP, dCTP, dGTP, dTTP, 25 pmol of each primer and 0.25 Unit of Taq polymerase. Thirty five cycles of PCR (denaturation at 94 degree C. for 1 min; annealing at 55 degree C. for 1 min; elongation at 72 degree C. for 1 min) are performed with a Perkin-Elmer Cetus automated thermal cycler. The amplified product is analyzed by agarose gel electrophoresis. The PCR product is verified to be the selected sequence by subcloning and sequencing the DNA product.

[1345] Use of the above methodologies and/or other methodologies known in the art generates fragments from the clone corresponding to the approximate fragments described in Table 8, below. Accordingly, Table 8 provides a physical characterization of certain clones encompassed by the invention. The first column provides the unique clone identifier, “Clone ID NO:Z”, for cDNA clones of the invention, as described in Table 1A. The second column provides the approximate size of the cDNA insert contained in the corresponding cDNA clone.

TABLE 8

| | |
|---|---|
| Clone ID | cDNA |
| NO: Z | Insert Size: |

No Entries

[1346] It will be clear that the invention may be practiced otherwise than as particularly described in the foregoing description and examples. Numerous modifications and variations of the present invention are possible in light of the above teachings and, therefore, are within the scope of the appended claims.

[1347] The entire disclosure of each document cited (including patents, patent applications, journal articles, abstracts, laboratory manuals, books, or other disclosures) in the Background of the Invention, Detailed Description, and Examples is hereby incorporated herein by reference. In addition, the CD-R copy of the sequence listing submitted herewith and the corresponding computer readable form are both incorporated herein by reference in their entireties. The specification and Sequence Listing of each of the following U.S. applications are herein incorporated by reference in their entirety: Application No. 60/179,065, filed on Jan. 31, 2000; Application No. 60/180,628, filed on Feb. 4, 2000; Application No. 60/214,886, filed on Jun. 28, 2000; Application No. 60/217,487, filed on Jul. 11, 2000; Application No. 60/225,758, filed on Aug. 14, 2000; Application No. 60/220,963, filed on Jul. 26, 2000; Application No. 60/217,496, filed on Jul. 11, 2000; Application No. 60/225,447, filed on Aug. 14, 2000; Application No. 60/218,290, filed on Jul. 14, 2000; Application No. 60/225,757, filed on Aug. 14, 2000; Application No. 60/226,868, filed on Aug. 22, 2000; Application No. 60/216,647, filed on Jul. 7, 2000; Application No. 60/225,267, filed on Aug. 14, 2000; Application No. 60/216,880, filed on Jul. 7, 2000; Application No. 60/225,270, filed on Aug. 14, 2000; Application No. 60/251,869, filed on Dec. 8, 2000; Application No. 60/235,834, filed on Sep. 27, 2000; Application No. 60/234,274, filed on Sep. 21, 2000; Application No. 60/234,223, filed on Sep. 21, 2000; Application No. 60/228,924, filed on Aug. 30, 2000; Application No. 60/224,518, filed on Aug. 14, 2000; Application No. 60/236,369, filed on Sep. 29, 2000; Application No. 60/224,519, filed on Aug. 14, 2000; Application No. 60/220,964, filed on Jul. 26, 2000; Application No. 60/241,809, filed on Oct. 20, 2000; Application No. 60/249,299, filed on Nov. 17, 2000; Application No. 60/236,327, filed on Sep. 29, 2000; Application No. 60/241,785, filed on Oct. 20, 2000; Application No. 60/244,617, filed on Nov. 1, 2000; Application No. 60/225,268, filed on Aug. 14, 2000; Application No. 60/236,368, filed on Sep. 29, 2000; Application No. 60/251,856, filed on Dec. 8, 2000; Application No. 60/251,868, filed on Dec. 8, 2000; Application No. 60/229,344, filed on Sep. 1, 2000; Application No. 60/234,997, filed on Sep. 25, 2000; Application No. 60/229,343, filed on Sep. 1, 2000; Application No. 60/229,345, filed on Sep. 1, 2000; Application No. 60/229,287, filed on Sep. 1, 2000; Application No. 60/229,513, filed on Sep. 5, 2000; Application No. 60/231,413, filed on Sep. 8, 2000; Application No. 60/229,509, filed on Sep. 5, 2000; Application No. 60/236,367, filed on Sep. 29, 2000; Application No. 60/237,039, filed on Oct. 2, 2000; Application No. 60/237,038, filed on Oct. 2, 2000; Application No. 60/236,370, filed on Sep. 29, 2000; Application No. 60/236,802, filed on Oct. 2, 2000; Application No. 60/237,037, filed on Oct. 2, 2000; Application No. 60/237,040, filed on Oct. 2, 2000; Application No. 60/240,960, filed on Oct. 20, 2000; Application No. 60/239,935, filed on Oct. 13, 2000; Application No. 60/239,937, filed on Oct. 13, 2000; Application No. 60/241,787, filed on Oct. 20, 2000; Application No. 60/246,474, filed on Nov. 8, 2000; Application No. 60/246,532, filed on Nov. 8, 2000; Application No. 60/249,216, filed on Nov. 17, 2000; Application No. 60/249,210, filed on Nov. 17, 2000; Application No. 60/226,681, filed on Aug. 22, 2000; Application No. 60/225,759, filed on Aug. 14, 2000; Application No. 60/225,213, filed on Aug. 14, 2000; Application No. 60/227,182, filed on Aug. 22, 2000; Application No. 60/225,214, filed on Aug. 14, 2000; Application No. 60/235,836, filed on Sep. 27, 2000; Application No. 60/230,438, filed on Sep. 6, 2000; Application No. 60/215,135, filed on Jun. 30, 2000; Application No. 60/225,266, filed on Aug. 14, 2000; Application No. 60/249,218, filed on Nov. 14, 2000; Application No. 60/249,208, filed on Nov. 17, 2000; Application No. 60/249,213, filed on Nov. 17, 2000; Application No. 60/249,212, filed on Nov. 17, 2000; Application No. 60/249,207, filed on Nov. 17, 2000; Application No. 60/249,245, filed on Nov. 17, 2000; Application No. 60/249,244, filed on Nov. 17, 2000; Application No. 60/249,217, filed on Nov. 17, 2000; Application No. 60/249,211, filed on Nov. 17, 2000; Application No. 60/249,215, filed on Nov. 17, 2000; Application No. 60/249,264, filed on Nov. 17, 2000; Application No. 60/249,214, filed on Nov. 17, 2000; Application No. 60/249,297, filed on Nov. 17, 2000; Application No. 60/232,400, filed on Sep. 14, 2000; Application No. 60/231,242, filed on Sep. 8, 2000; Application No. 60/232,081, filed on Sep. 8, 2000; Application No. 60/232,080, filed on Sep. 8, 2000; Application No. 60/231,414, filed on Sep. 8, 2000; Application No. 60/231,244, filed on Sep. 8, 2000; Application No. 60/233,064, filed on Sep. 14, 2000; Application No. 60/233,063, filed on Sep. 14, 2000; Application No. 60/232,397, filed on Sep. 14, 2000; Application No. 60/232,399, filed on Sep. 14, 2000; Application No. 60/232,401, filed on Sep. 14, 2000; Application No. 60/241,808, filed on Oct. 20, 2000; Application No. 60/241,826, filed on Oct. 20, 2000; Application No. 60/241,786, filed on Oct. 20, 2000; Application No. 60/241,221, filed on Oct. 20, 2000; Application No. 60/246,475, filed on Nov. 08, 2000; Application No. 60/231,243, filed on Sep. 8, 2000; Application No. 60/233,065, filed on Sep. 14, 2000; Application No. 60/232,398, filed on Sep. 14, 2000; Application No. 60/234,998, filed on Sep. 25, 2000; Application No. 60/246,477, filed on Nov. 8, 2000; Application No. 60/246,528, filed on Nov. 8, 2000; Application No. 60/246,525, filed on Nov. 8, 2000; Application No. 60/246,476, filed on Nov. 8, 2000; Application No. 60/246,526, filed on Nov. 8, 2000; Application No. 60/249,209, filed on Nov. 17, 2000; Application No. 60/246,527, filed on Nov. 8, 2000; Application No. 60/246,523, filed on Nov. 08, 2000; Application No. 60/246,524, filed on Nov. 8, 2000; Application No. 60/246,478, filed on Nov. 8, 2000; Application No. 60/246,609, filed on Nov. 8, 2000; Application No. 60/246,613, filed on Nov. 8, 2000; Application No. 60/249,300, filed on Nov. 17, 2000; Application No. 60/249,265, filed on Nov. 17, 2000; Application No. 60/246,610, filed on Nov. 8, 2000; Application No. 60/246,611, filed on Nov. 8, 2000; Application No. 60/230,437, filed on Sep. 6, 2000; Application No. 60/251,990, filed on Dec. 8, 2000; Application No. 60/251,988, filed on Dec. 5, 2000; Application No. 60/251,030, filed on Dec. 5, 2000; Application No. 60/251,479, filed on Dec. 6, 2000; Application No. 60/256,719, filed on Dec. 5, 2000; Application No. 60/250,160, filed on Dec. 1, 2000; Application No. 60/251,989, filed on Dec. 8, 2000; Application No. 60/250,391, filed on Dec. 1, 2000; Application No. 60/254,097, filed on Dec. 11, 2000; and application Ser. No. 09/764,892, filed Jan. 17, 2001.

[1348] Moreover, the microfiche copy and the corresponding computer readable form of the Sequence Listing of U.S. Application Serial No. 60/179,065, and the hard copy of and the corresponding computer readable form of the Sequence Listing of U.S. Application Serial No. 60/180,628 are also incorporated herein by reference in their entireties.

The application's sequence listing, which the Patent Office published only in electronic form, follows.

SEQUENCE LISTING (1019 sequences)

SEQ ID NO: 1 - DNA, 733 bp, Homo sapiens
gggatccggagcccaaatcttctgacaaaactcacacatgcccaccgtgcccagcacctgaattcgagggtgcaccgtcagtcttcctcttccccccaaaacccaaggacaccctcatgatctcccggactcctgaggtcacatgcgtggtggtggacgtaagccacgaagaccctgaggtcaagttcaactggtacgtggacggcgtggaggtgcataatgccaagacaaagccgcgggaggagcagtacaacagcacgtaccgtgtggtcagcgtcctcaccgtcctgcaccaggactggctgaatggcaaggagtacaagtgcaaggtctccaacaaagccctcccaacccccatcgagaaaaccatctccaaagccaaagggcagccccgagaaccacaggtgtacaccctgcccccatcccgggatgagctgaccaagaaccaggtcagcctgacctgcctggtcaaaggcttctatccaagcgacatcgccgtggagtgggagagcaatgggcagccggagaacaactacaagaccacgcctcccgtgctggactccgacggctccttcttcctctacagcaagctcaccgtggacaagagcaggtggcagcaggggaacgtcttctcatgctccgtgatgcatgaggctctgcacaaccactacacgcagaagagcctctccctgtctccgggtaaatgagtgcgacggccgcgactctagaggat

SEQ ID NO: 2 - protein, 5 aa, Homo sapiens
  misc_feature (3): Xaa equals any of the twenty naturally occurring L-amino acids
WSXWS

SEQ ID NO: 3 - DNA, 86 bp, Artificial Sequence
  Synthetic sequence with 4 tandem copies of the GAS binding site found in the IRF1 promoter (Rothman et al., Immunity 1:457-468 (1994)), 18 nucleotides complementary to the SV40 early promoter, and a Xho I restriction site.
gcgcctcgagatttccccgaaatctagatttccccgaaatgatttccccgaaatgatttccccgaaatatctgccatctcaattag

SEQ ID NO: 4 - DNA, 27 bp, Artificial Sequence
  Synthetic sequence complementary to the SV40 promoter; includes a Hind III restriction site.
gcggcaagctttttgcaaagcctaggc

SEQ ID NO: 5 - DNA, 271 bp, Artificial Sequence
  Synthetic promoter for use in biological assays; includes GAS binding sites found in the IRF1 promoter (Rothman et al., Immunity 1:457-468 (1994)).
ctcgagatttccccgaaatctagatttccccgaaatgatttccccgaaatgatttccccgaaatatctgccatctcaattagtcagcaaccatagtcccgcccctaactccgcccatcccgcccctaactccgcccagttccgcccattctccgccccatggctgactaattttttttatttatgcagaggccgaggccgcctcggcctctgagctattccagaagtagtgaggaggcttttttggaggcctaggcttttgcaaaaagctt

SEQ ID NO: 6 - DNA, 32 bp, Artificial Sequence
  Synthetic primer complementary to human genomic EGR-1 promoter sequence (Sakamoto et al., Oncogene 6:867-871 (1991)); includes a Xho I restriction site.
gcgctcgagggatgacagcgatagaaccccgg

SEQ ID NO: 7 - DNA, 31 bp, Artificial Sequence
  Synthetic primer complementary to human genomic EGR-1 promoter sequence (Sakamoto et al., Oncogene 6:867-871 (1991)); includes a Hind III restriction site.
gcgaagcttcgcgactccccggatccgcctc

SEQ ID NO: 8 - DNA, 12 bp, Homo sapiens
ggggactttccc

SEQ ID NO: 9 - DNA, 73 bp, Artificial Sequence
  Synthetic primer with 4 tandem copies of the NF-KB binding site (GGGGACTTTCCC), 18 nucleotides complementary to the 5' end of the SV40 early promoter sequence, and a XhoI restriction site.
gcggcctcgaggggactttcccggggactttccggggactttccgggactttccatcctgccatctcaattag

SEQ ID NO: 10 - DNA, 256 bp, Artificial Sequence
  Synthetic promoter for use in biological assays; includes NF-KB binding sites.
ctcgaggggactttcccggggactttccggggactttccgggactttccatctgccatctcaattagtcagcaaccatagtcccgcccctaactccgcccatcccgcccctaactccgcccagttccgcccattctccgccccatggctgactaattttttttatttatgcagaggccgaggccgcctcggcctctgagctattccagaagtagtgaggaggcttttttggaggcctaggcttttgcaaaaagctt

SEQ ID NO: 11 - DNA, 506 bp, Homo sapiens
  misc_feature (356): n equals a,t,g, or c
  misc_feature (369): n equals a,t,g, or c
  misc_feature (403): n equals a,t,g, or c
  misc_feature (467): n equals a,t,g, or c
  misc_feature (505): n equals a,t,g, or c
tttaatacgactcactatagggaaagctggtacgcctgcaggtaccggtccggaattcccgggtcgacccacgcgtccgattttttattcaaatagaataatatttaacaatcaaggtcatatgacttaaaatcttctgagctgggtttaggattcagatagatagtttattgtcagttgacattaaaacaatgttcttggccaggcacagtggctcatgcctgtaattccagcactttgggaggctgaggcaggtcaatcatctgatgtcaggagttcgagaccagcctggccatcatagcgaaaccccgtctctactaaaaatgcaaaaattaacttggcattgggggcggccntttgtaatcccanctacttaggaggctgaggaagaaactcgcttgancccggaaggcaaagttgagtgagctgaatgcccactgactcagctgccaaacaaaatccgctcnaaaaaaaaagaaaaaaaaaaaggggcgtttaagtcatnt

SEQ ID NO: 12 - DNA, 138 bp, Homo sapiens
gggggcttctatgtatagccaaagctggtacgcctgcaggtaccggtccggaattcccgggtcgacccacgcgtccgctagtatgtgagcttgccacggactgggacttctattttttttttttttgaaacggagtct

SEQ ID NO: 13 - DNA, 521 bp, Homo sapiens
  misc_feature (512): n equals a,t,g, or c
tcaatctggacaaggagatcttgctgagaaaagagctacttgaaaaaattgaaaaagaaacactacaagtagaggaggaccgggccaaagccgaggcagtgaataagaggctccggaagcagctggccgagttccgggcaccacaggtgatgacttacgtccgggagaagatcttaaatgcggacctggagaagagcatcaggatgtgggaaaggaaagtggagatagcagagatgtccttaaaaggccatcgtaaggcttggaatcgaatgaaaataaccaatgagcagttgcaggcagattaccttgctgggaagtagccagaggcaggccacggcttacagaccactacatgacctataaaagtaatcagctcctttctagtcacgggctcctctcactgttccctgtctgcctggwgttcccaaccccccacccaggctgmgtatcatctcctgggccacatctgcccattgggaagttgttttcaaagccttggcccctggaactgnttacccttg

SEQ ID NO: 14 - DNA, 328 bp, Homo sapiens
  misc_feature (107): n equals a,t,g, or c
  misc_feature (151): n equals a,t,g, or c
  misc_feature (182): n equals a,t,g, or c
aattcggcagagcttggtctagtgcctggagcattgtgggtaccaggtttcgagagaatgtgtgctgccagaaagcagatctttgccacctcctctcccctcagctnctgaaccactgccagcagtgttctgggaatcaacctgtactttncttctgcatcctgggatgtaattctgggtgnttgtaagttggtttatggtctagcttagaattgaggcttctcttgagagagagcatgtgtgtaaaatgtttagcttgttctaatctgtggagcattctccttcatagaaaagatggggaattactggagatgaaaatctccattct

SEQ ID NO: 15 - DNA, 417 bp, Homo sapiens
  misc_feature (320): n equals a,t,g, or c
  misc_feature (341): n equals a,t,g, or c
  misc_feature (374): n equals a,t,g, or c
  misc_feature (401): n equals a,t,g, or c
aattcggcagagctggcctccgttcactctaccccctgctcccttcatctgttcctcttgcttcctcccagattcttcttttttccctggctctcatcatcctgcccagcttcagtccattccagagtcgaccagaagctgggtctgaggattaccagcctcacggaggtgagaggcaagggcagggagcaacccctggctgagcaagggagggggactctgttctccaaggtcgtsaagaagcaagagggaggtcctgtcctgtctagggtctcccacccaggggagcactttactactgccctcttgcctttcaactnaaagtgactttcagaattatnctgacccacaaggacgtaacagaaaatttgggngacccaatggttagagttccagattgnggggggccacttgggg

SEQ ID NO: 16 - DNA, 332 bp, Homo sapiens
  misc_feature (85): n equals a,t,g, or c
  misc_feature (179): n equals a,t,g, or c
gaatgcaaacagtagatataacgctggtggctggcccggcagacactcgcagtccgtccttaagagcaatcggtcatcactgaanggggactataccgatagtgctgaattacgtcttgttctgcacgatatatcaggcaatccgatcaaagtttctggaaggggatgggaatttgtgncaatcaggtactaacgtgccctatatkaaaaattagcgcaattgattacagtctaaatatcaacggtggattacaaagccactgttacaggaggcggagagggtwtcgcaacgytggatccctgtattgaatggtgttccatccaagctggtt

SEQ ID NO: 17 - DNA, 507 bp, Homo sapiens
  misc_feature (360): n equals a,t,g, or c
  misc_feature (383): n equals a,t,g, or c
  misc_feature (423): n equals a,t,g, or c
  misc_feature (449): n equals a,t,g, or c
  misc_feature (463): n equals a,t,g, or c
aattcggcacgagatggattctacttagctgggtggctccctgcactctgggcttgacacagtgaaagcaaactcttacttccatgaagcaatttcatgggcttttgttttctttttaattacccaattgctgaggcctctcacctaattctcaggctttgaacaaaacattccaccccccaggctgcttttccccactgtgcactccacatggsttcatgctgctgcagactccacccttcccagtggytccccaggcagcactcacaaactgctctcaccagctctcccgcggaggggcctacttctgggggacagaaaatattggaggagaccttggccttggatattccagaggtnaacagcacgttcctggacctcantgttggttggtggaacctgccttttaggcccttccatttnctaaggtgttcaaccccattctggantgtgccccaatttnagcaaacacaaattcaagttcatgggacaatcctattgaaggcc

SEQ ID NO: 18 - DNA, 139 bp, Homo sapiens
  misc_feature (41): n equals a,t,g, or c
tggctgatgcacgacccggcatacccggagagcctgcccgntgcgccactggtgcggtacacgtatacggaagccggtgaactgctggcggtatatgaccgcagcaattacgcagtgcgcgyttttcamgtatgacgcg

SEQ ID NO: 19 - DNA, 447 bp, Homo sapiens
  misc_feature (109): n equals a,t,g, or c
ggaagcattgtgggtaaaggcctggaggcaggaaagtgaaggacaatttcaagaaactcagttcatcaattttcatcaacaccttcctgggccatgcctggtactgagnaacccagccctgaatctgacatcattttccctttcagagcatagaatgcaggggatccaggaatgggttaacagaagagaagctggatcaaggagacctttgcgtaccaggtgaaggagtttgaactttgttctgcaggcaggcagagcacgacaggctcctacctgggtcacttcattctcctatttctcttctcttccatcctgtagtcccagctactcgggaggctgaggcaggagaatggtgtgaacccaggaggtggagcttgcagtgagctgagatcgcaccactgcactccagcctaggtgacagagtgagactccatctcaaaaaaaaaa

SEQ ID NO: 20 - DNA, 522 bp, Homo sapiens
  misc_feature (236): n equals a,t,g, or c
  misc_feature (354): n equals a,t,g, or c
  misc_feature (468): n equals a,t,g, or c
  misc_feature (487): n equals a,t,g, or c
  misc_feature (518): n equals a,t,g, or c
gatggcaccagcgtggctgtgaaggtgcagtacatcgacctgcggkaccgctttgatggggacatccacaccctggagctcctgctgcggctcgttgaggtcatgcaccccagctttggcttcagctgggtcctccaggacctgaaggggaccctggcccaggagctggacttcgagaatgagggccgcaacgcakagcgctgtgcgcgggagctggcgcacttcccctacgtcgnggtgccccgcgtgcactgggacaagtccagcaaggtgggttgggccaggcccttggggtgggcacagcgctgggcctgctgagcccagcctcttgctctccccagcgcgtgctcctgncgacttctgcgccggctgcaaaggcaacgaatgtggaggccatcaggagccaggggctgcaagtgcatgacataagcagaaaaagctcatcaaggcctttgctgagcagaatantttacacccgggtttcatncacttcggacccacaatccttggcaaacggnaagg

SEQ ID NO: 21 - DNA, 429 bp, Homo sapiens
ctcctagatggaaggaatgctttgcttttctgtttgccctttgtttttgtttttgaagcctgggcgacaagagtggaaactctgtctcaaaaaaaaaaaaaaaaaattcagtgaaatacacctttatatatgagatccaagtttcactttttgtgatataatgagccagttttctcagtaatgtctactaaaaaaaaagccattaacctttctctaatatttgcatgattctaataaaagtatgtcaacttcttaaaatgttttattgaaatgtggcattcctttgaattttatgacattaaaataatccacgacatggtacagctcttcactttttcagctttttaaatgtccattaataagtttgaatacgttaaaattatatgtttaacctcaacaaaataaatggcaatatgttcaaaaaaaaaa

SEQ ID NO: 22 - DNA, 483 bp, Homo sapiens
  misc_feature (361): n equals a,t,g, or c
  misc_feature (403): n equals a,t,g, or c
  misc_feature (482): n equals a,t,g, or c
  misc_feature (483): n equals a,t,g, or c
gctgggatggaacccctgcccttggtgccaccactgctctttcataactgtgggctcttccgaaagtgacttcatggctcagtgcctcggcctcccaaagtgctggaattgcagacatgagccggcacgtctggcctatattctgatttatattcaaagtagactttgcagcaagacaataggcttggaagacaggttagtgacgcagttcatgatggggttcacaaaggggctggtgctgaggttcgagatggcatttgtgataggattggtgatgggttcatgatggggttcgtgatgrggstggtgatgggttaccctggggacagtgagaaggaaaggcagagacagaggagctcanatgcctggcttggcttcccttgactcccttcagtgctgtggnggttgtttcaaaaacatctggacagccaggcatggtggctcacatctgcaatcgcagcactttgggaagcccgaggcgnn

SEQ ID NO: 23 - DNA, 118 bp, Homo sapiens
  misc_feature (117): n equals a,t,g, or c
gtagaaacctctatgaaacaatttttattttcctttgcataataccttagaaatgtgttaaggacaagctatattttccttacttgcttttgatagttttttttttttttttaaagna

SEQ ID NO: 24 - DNA, 724 bp, Homo sapiens
  misc_feature (562): n equals a,t,g, or c
  misc_feature (642): n equals a,t,g, or c
  misc_feature (693): n equals a,t,g, or c
  misc_feature (722): n equals a,t,g, or c
  misc_feature (723): n equals a,t,g, or c
  misc_feature (724): n equals a,t,g, or c
gcaaatgctgattttctgtgtcaattgctggggcccagagactaggggtcagagtactatggtcactgygataaataaccttgctattgtctgttagtattttcactcttagcccagagactgggttcccagcttggccctcagtgcccatcccactacccatgacagcccaatggctccacagagcctggagctctaaagaagatgggctgaaaatgtcagatctatgtgaggagccttcctgctctaaaagctctcatccctctggcccagatctctggttttctttgatttattgttcttacaacccagaagcattagatctttttggtggaagccagaaaggcatctcttgtttacccattaacaatcaacgttatgtgtacatatgtttatccattaacatgtatggcttattcatttgctcattcttccaacaaatgcaactgagcttctattagcccaggcatccacgatatacacaatggaggtatattcttgactctggaggttcttacaagtcaaataagggagagagaaaaagtcaaccaatgctttctgngkaccaagaactcagcacacatctagcaggctttggctaatttgatcttcacagaaaatgactcccattttacagaggangagacaggccctggggatattaagcaaggtttttaaaggcatgaatcctgnaatawtaaagccatggaatattaaaaaannn

SEQ ID NO: 25 - DNA, 516 bp, Homo sapiens
  misc_feature (108): n equals a,t,g, or c
  misc_feature (516): n equals a,t,g, or c
gtctttatctggtctattcccttgcctttttgtcattttatagttatttctttacattctgtctccacctttttctccttgattaaactttccaagaagtttaattgntttacttgttgttgttttacttttcattttcctaattatttgtatgcatgaacatcctttatcaattagtcattcacatgtctttattcagagctttgtatattcatatcctttgcatgggctaatgatacataccctttgtacctttctgctggctgataracctttttcttattaatgtgtcatattgtggatgcaaattatttatctgaaatgagcttatctaattgacatttatcttacagctttgctcatttagggagttgctgatgtagctgatttttgccacacagaactttcataattatatgaatcccagtcttttcctttatagcatctggatttcctgtcttttgaaaagacctccccatgccaagagtttgaaaataaaattgagaaatgaaatan

SEQ ID NO: 26 - DNA, 839 bp, Homo sapiens
  misc_feature (1): n equals a,t,g, or c
  misc_feature (824): n equals a,t,g, or c
ngtatatttatagtaatgaaaagactttttaaattgtacacgtttcagtgcctttcttgtgttatgaaaggcaggtagatattatagccataggtaaaaatccatagttaaattgcacactgaccttaaatctctctgtgtatgcccttgtatcttgcatgttaaaagttggattattgggcatgtgtggcagcctgcctgctacatgctagacaagtgtgctttagtacatagccacaagttcttcattctttaaaatgttttgacagatcatctcataataaaaataattcaggaaaactatggggaaatagttacatttcacaaaagatattttaaactctttgtaaaacttagataatagagcctagcagttactttgtatctaattgatacattttatgttaatttaccaccatacattttattaatcaaaattgtatagcatgtgactcttttggctttcagagttctcaaaaatattattttgttgcatgtactgtatgtttagaggcaaccaattatatactcaatatggttttactgtgccttacacaaagagaaactctatacagaatgtatgtcatggggtggggtaacagagtctttactgcactgttaggtgatggcacacagagcatgtcccagaacatttctgtgcttaattacccaaccaaagagatctgaagtatgtatgtcgtactgtaatgggggtttatgcctggacaattaagtgttttatttgttttctgaaatgatgtgaacttatttttctaaacactatgctaaataaactttatatttatacataaaaaaaaaaaggngccgttaagatcagt

SEQ ID NO: 27 - DNA, 565 bp, Homo sapiens
  misc_feature (40): n equals a,t,g, or c
  misc_feature (49): n equals a,t,g, or c
  misc_feature (81): n equals a,t,g, or c
ttctaactggaaattgactctcggggaaagctggttatanggggatctntctaaagggaatcacctcagggaaagctgttncgcctgcaggtaccggtccggaattcccgggtcgacccacgcgtccgcacaaatgccaaaatggtgcgtattctagcagtagttttatggacatcaaatgcctgaaagaaagatcaggaagttgtatgtacagttgatctgaaatgcaacaacttgattaggaaaagtgatacaggaaacttttcccactgcaccttccagaggcactgaggttcggttcctgccacccctgccagtgctttctgtggtgccaggaccacatccgtcagtgtttctgccaggcgtcatggtgcagtggggtttgagttgatgctctttctgtccactttgctcttccaatgttttatagaactggttagtactgcagaaaaaccacgacttaaagaaggccttatacatgaacaagacacagttgctcagttcggaccacaaaaagaaccagtaagacagcagattcatcgcatgttcctcttaagagtgaagc

SEQ ID NO: 28 - DNA, 438 bp, Homo sapiens
  misc_feature (193): n equals a,t,g, or c
  misc_feature (206): n equals a,t,g, or c
  misc_feature (359): n equals a,t,g, or c
  misc_feature (375): n equals a,t,g, or c
atggtagaggaaagagtatggtaagtgtggtgtgcaagcccatctagtgggagcacagttgaggagggaacaggaggtggaagccaggtgggaaaggaagtctggggccctgttggaaggaccttgaatgctgtgttgttatgatagacagttttcctccatgattcctgctcataactcccatagcccttgntacagtcttttgntgtaatattgagtgtgttaggccacaggaaacagactctcttcttctcctgcccttctttcacctgccccaggcaggactctaatctttcctggacttttcaatggttggtcttaagaccattcccagagaggtcccaccctataccccgggngaaggaatgcttacgntataaagctttcataaaaacccaagcggacagggttcaaggagctttgggatactgaacacat

SEQ ID NO: 29 - DNA, 616 bp, Homo sapiens
  misc_feature (451): n equals a,t,g, or c
  misc_feature (490): n equals a,t,g, or c
  misc_feature (568): n equals a,t,g, or c
  misc_feature (579): n equals a,t,g, or c
  misc_feature (586): n equals a,t,g, or c
  misc_feature (588): n equals a,t,g, or c
gctttaaaaaaatccacctgtcttcctgaatgacgcaccacccaccccaccccagcccaaagctaaagcatcctggacaagttcttatgcaaaggagcaggcctgtctcaggcctctagaagagtcggctcctgcctggaggcacttcctggctaggtgggagacagtccaatcaccatggcccacaggaagcaatagctcactctgtgccagttaccgctgagggtattcctgctcgggaacacccaaatgaggtataaactttcccccagacacttgaaacttgaaaacttcccaccaacctgaaacatgggagcaggagctagaagacagggtgctgcacacggtgggtgccagtyccaccagcctgaaacatgggagaaggagctaaaagacagtgctggcacacaatgggtgccaawtctgaatggcaaatgrctaatggaattgngacccgaaggtgtgctggcctggaaaatgaacttatgtnagaactaacgattggcaaaatggccctgaatggggaaaagatggctttttagggggttaaggatacgggtttaaggcnatcccaggtgncatctgnanagaaacttggagaggtaacgaggattgg

SEQ ID NO: 30 - DNA, 313 bp, Homo sapiens
  misc_feature (176): n equals a,t,g, or c
gacaggctattttatctcttgaatcagaacaagtgccattaatgtcagcacactggtgcttaaaaaacaccttcaaagwtggagccgttgcaggaaatgattggttaatttgggatattactcggtccaggtactttcttgatatgtttgtctattacacaccaaaaaaaggcagnaactgttgctaaatgatccactcatccatcctgttatacctgagactatgctgtcaagcgaaagcaagtctttcctatagaaggccagagctataggatttttatataacataaacttgctatgcagatttactctg

SEQ ID NO: 31 - DNA, 452 bp, Homo sapiens
  misc_feature (18): n equals a,t,g, or c
tatatataaatgtagcanacatatattacagtttcactgtgtaatagattatccataataattccataaatattcctgctgaagttagtttgtaacttcaagtcaaagatgaaaaatatcaatggtgaagattgattgttcatatagagaggacattttttttccagactgtaaaactgaatcttgttgaatttaaagagaaattctggcagaggcagatgaatcacctgaggtcaggagtttgagaccagcctgatgaatatggtgaaacccagtctctactaaaactacaaaaatagccaggcatggtggtgggtgcctgtaatcccactcgggaggctgagtcaggagaattgcttgaacccggaggtgaagattggagtaagccaagattgtgccgttgcactacagcctgggcgacagagcgagactccatataaaaaaaaaaaaaa

SEQ ID NO: 32 - DNA, 689 bp, Homo sapiens
  misc_feature (447): n equals a,t,g, or c
  misc_feature (686): n equals a,t,g, or c
tggattttctaatgtaagaaaatgttgctgttagtaaaagtttcctcagtgtgccagaaagcagatggtggcagtgaatagtgttttcttttgccaggttttgtatatgctttctaaacctgcaagagattttgcttttccagattcagatttctgatcttttttattttaaaacagaaatagaaacttatatttaaatgtacttgcatcatgtggtctgtttgacatattatggttacttgaaaatgttgagtaacatttgatgttctgcatgaatttcttctctaagagtcttgggacttttaatgttgttctatactctctctctttatggaaataaaratttctgccttgagagtgctacaatggggagttttgagtgatttatgaaaagcaatgggtaagatttttttatgtgaaaatttgtattttgtttcactcccaatnactgtgcaagtaccagcttttcacagtgaggtttcttacagcatgactttgttcattatgacttcagtgtttgtatacagttttgaataatttatttctgtctactactggtgagatgttactttctgctaatttaaaatgttttgcctaacgtttttaatgaaagtccttataaatatgtttgtttaaagtctgaaatctaaacatgtccttaacagtaccaacgaggcagcattaanaca

SEQ ID NO: 33 - DNA, 370 bp, Homo sapiens
  misc_feature (287): n equals a,t,g, or c
  misc_feature (369): n equals a,t,g, or c
  misc_feature (370): n equals a,t,g, or c
gcagcttctgaagtctgcagagttatgtcttttgtcaaatttgggaaattttcagccattgcttctttgatttttcagccccacactttttcccatctcccctggaacccttatgacacagatgtgagatcattgttcatagtcccacaggtccctaaagctctgtccatcttgttttcccatgcattttctattcatttttcagaatgggaaatttctgttctgtcttcaagttcactggttctttcctctgttctgtctattctgccagtgattcctttatagantttttaaaatttcagttatggtatttttcagttctaaaatttccatttgggtccttcattatgtcttctatttatttatttnn

SEQ ID NO: 34 - DNA, 613 bp, Homo sapiens
  misc_feature (573): n equals a,t,g, or c
  misc_feature (592): n equals a,t,g, or c
  misc_feature (602): n equals a,t,g, or c
gaaaaaacactcctcatgccccaagtcatacccgatgccaattaaatcagaatgtctcaagttggaagttaggcagtttttaaagctcctcaggtgattgcagtgtgcagaaagtttgagaaccactgcttaattgaatgtaggaggatgaactgcttctatttggtgggaccttgggcaagtcagttttaagccttggttcccatatctgtaaactgggtgttggattaaatgtcatgtaaggttccgtggtccttttcagcatataacttcaaattctgtaatgttaaaatcaatttggacatgaaaatgtttgaagcactatagaagtatccatcttagatgctaatgttacagactttttaaaaaagtgctaacattgtatggacttaaaattcaratttgccttccctcaattattttgagcctcartttaragactgagggcaaatggaagcatataacttaccttaracaactcctkgtttctgatacacaacatctktgggtaatttaggaatacagtaacatatatcttaaaagtcgtgtctgttcactaatattttacttaanccaatgttggaatacttgncaataatatnacactttgtaa

SEQ ID NO: 35 - DNA, 539 bp, Homo sapiens
  misc_feature (364): n equals a,t,g, or c
  misc_feature (519): n equals a,t,g, or c
ggaaaaatggcagagttaagatgatacccccaggatgatgaatacaattgacttcttattggatttggaacgtaattagaaagaaatatgcacaaaggacagtaacgtatccacatatagatgtacccactcagcctcacttcatagccagtcctgatccttttcaaattcagttgaactactttgggccacagtctcccagattaccaggtacttgctaaaaatatttagagtaactaaaagcagatcatcccaagaaacttacttcaagttaattgaaaatccaatattcctgaatcatttgttaatagttctcaaagaataatggtaataagacaattcccacatacctctactctttggntttataaagtataaacctgggcactaaaataatttaactacctgatatggacaagaactcaataaccagcataatcaggaatgagactttatttattcagtaaggacttgcaaccatatccatacaaaagtcttttcctttcattcatgctggantcaaatgaatagcaataaaa

SEQ ID NO: 36 - DNA, 609 bp, Homo sapiens
  misc_feature (475): n equals a,t,g, or c
  misc_feature (477): n equals a,t,g, or c
  misc_feature (492): n equals a,t,g, or c
  misc_feature (535): n equals a,t,g, or c
  misc_feature (571): n equals a,t,g, or c
  misc_feature (589): n equals a,t,g, or c
gccacaacgcccagcctgcttgaacttttaaaaagatttgtcagtcatatgttaaacattttagaggactcttctgttttcttcctgctttatctccaattcatactacctccccaatgtctacctttaaggagaaaccatcccatattgtaagcttgaaagggtcatttataataaacgtaaccagktwtgttcacagatacataawgtgcctctttaagatgactagagatcagatttgccaaattttcctctctgatttctatcaaggtcatcctaggtatgtctcatctgtttaatcttcctttctacgtagcctaatccatagtatatttttttttgtggtccaccacttagttctttttctttatttggactcagatggggtgaaagtattactttcaacttgagtcgctacatttccccaagaagaatttggggagggtgaaggtgaccctgaaaagggccctgtagngnctcccaagttttcgnctttgcttgggtccctcctgggctctctgtcatctttggtcanagtctcaatcactcatgggcttaaatttcatgtcanatctttagtaggaataanatggctgcttaaaagcctgg

SEQ ID NO: 37 - DNA, 609 bp, Homo sapiens
  misc_feature (562): n equals a,t,g, or c
  misc_feature (582): n equals a,t,g, or c
  misc_feature (603): n equals a,t,g, or c
gaacaaaagctggagctccaccgcggtggcggccgctctagaactagtggatcccccgggctgcaggaattcggcacgaggaagtttcaatttagaaccccgccaacccctcgcctttggcatggaaacaccatcggtggtaccagtaagggtctctcctttgctgccgacatgggggatttggggttctttctccttcccatctttcctgtgccctttgcagacctaggctagccaccctccaccaggctagccagctccaatctgattttcttagattgtaggtcttggtcccccagcggtctgtcgtgccattgggaaggatttgagggtagacctggccttggtgtccctgccattgcctggggaccaggggccctgagggtcccacgtggtgggttaagtcaagtggaccatgtgcttaaacttcttggactagctttttctgctggttggacacatcatcttgkgttcgtgatctgatgcgttagccctaacttttacatctgctattggaattkggaattaaagaaaaatagcccactttagaggagagaagatnagaagaggaggctagataangatgttgaaagctaacaaagnaaaagg

SEQ ID NO: 38 - DNA, 631 bp, Homo sapiens
  misc_feature (19): n equals a,t,g, or c
  misc_feature (27): n equals a,t,g, or c
  misc_feature (28): n equals a,t,g, or c
tttaagggggacccctttntcactaannggaacaaaagctggagctccaccgcggtggcggccgctctagaactagtggatcccccgggctgcaggaattcggcacgaggagtgatgcagttataagccaaagaacaccaaggattgccaggagccgccagaagctggtaggggcaagaaaagatcctcccctagagccttcccagggagcatggctttgccaacgccttgattttggacttctagcctccaggactgagaaagaatgaatttttgttgttttaagccctgaaattcatggtaattcgttatggcagtcctaagaaagtaacctaggagcctagggatagaagagtgggaatggcacagttgcagatggagaagaataaaaagactttatttagattcaaatcaaagkgttaataatcattcataggctactttcttgtcatctacattttgctttttttaatcctgcagtgaggacagagggaggcatgaattttccttgatttcccagttagagctactagaacatgtccctcttttgcattttgaataaggtgtgtcttcccctagtccccctccttactgaatttctttttctctgctgtttgtgaactgacagtat

SEQ ID NO: 39 - DNA, 648 bp, Homo sapiens
  misc_feature (453): n equals a,t,g, or c
  misc_feature (520): n equals a,t,g, or c
  misc_feature (522): n equals a,t,g, or c
  misc_feature (609): n equals a,t,g, or c
  misc_feature (627): n equals a,t,g, or c
  misc_feature (647): n equals a,t,g, or c
gtgttaatatccattatggtaaatgagagattttggtaaatgaagtttcaaccctcttactgctttccccacattccccatcctcctaatgtagttaaatcataatatttagtcaaatcagtgktaagcatttgctttattgtgattatctaaatagtattctctgctgagccatgtagagcactatgtttatgtttccttttttgtacacagttacaaatgtatcacacaataggtcaagtttttgtttgtttgtttagagacaaggtctcactctcttgcccaagctggagtgcagtggtgcaatcaagcttcactgcagcctcaaatacctaggctcaagggatcctcctgcctcagtctctccattagctgggacctcagatgtgcaccaccatgctcttttgtagagatgcatcttttgtagagatgggatctttctgtattggccangatggtctggaacacctggcttcaagcaatcctccctccttggcctcccaaagtgttatgattatangngtgagccactgtgcccagcccagttttgagactggactcctcctggagtcctattctgcctgctctcttccagagctgccacacagntccaagcttgggaggtgnctccctcctactgggtttcnt

SEQ ID NO: 40 - DNA, 143 bp, Homo sapiens
  misc_feature (142): n equals a,t,g, or c
gctcgtgccgaatcggcacgagttcggcacgagctctggtgtccggctgtgggcggcttctccgtgggctactagcgggcccggcatctaccagctggtctcggcttccagctcgcgggttcagggaagtggtggagacccna

SEQ ID NO: 41 - DNA, 425 bp, Homo sapiens
  misc_feature (412): n equals a,t,g, or c
  misc_feature (415): n equals a,t,g, or c
  misc_feature (422): n equals a,t,g, or c
gtccactctgagagatttcccttcattcttagtgaattatttcatttggctattaatttccaaggtctccttttgatcctgtaattgttccttcttatagccttttattctttttgtgtggatgcatagcccatctctaagaataggaattaaattttatcaaggytttcttcttctccctgccttgcctttgtttcctccagatttcctttctctactgtgwttgttttggtctgtctttcaggtaagatactttcctacaatttctagtgagccatggctatccattcatatttaagagggaggcactaaaagccaatagcaagytgtatgtgcatggatttctcttaggctagtcaatttccaataaagaaatcttttattcttttgcctagaggtggatgggcctagnggngggatgncat

SEQ ID NO: 42 - DNA, 613 bp, Homo sapiens
gtgaaggtgatgctagctgctataacaaataagcacgcctgtgcacagttgctcaaagatagtagaagtttatttcttgtttatataagatccataatgactcttgccaattagcaggctgctctcttccaagtggtaacccagggactcaagctcttttcatcttgtggctcagccatctgacacatgtggcttccagcactgccctgctgttgtctgcacaaagctgatggaagaagtaggaatttgcaggaccatgtgtggagcattttaaggatgaggcctgggagtggcacaaatctttgaactccaggaggctaggaaagagagcataaccttgtgcccaggaagatgcggggcatagtacatctttgcctcacctgatgtattgtttgtttaaaatcactttggattctcatttaccttttccccctcaagatctttggttttgactttggagatwaccagaaataactaagcatgcttcgtccctctacgatttcatcctcatggggaagcaagaccccactcttttattttcatgatgtatatatgatgkatgatgtatgtatgtatgtttgagacagagcgaggactcctctcaaaaaaaaaa

SEQ ID NO: 43 - DNA, 674 bp, Homo sapiens
  misc_feature (541): n equals a,t,g, or c
  misc_feature (630): n equals a,t,g, or c
  misc_feature (651): n equals a,t,g, or c
gctgagcttgaaataagttgatacacaaaaggagatgtcagttagccagttggatatgttagtctcaaggaagagattggagttggagataataatttgccaagcaccagtatatagatattatttaaagcaatatatttgaatgaaattaccttgaagatgaatgtagatatagttgaaaggaaaccatagatctgaactctaccagccaccaacattcagatgtccagaaaaggaaaaggatccagcaaagtaaactgagaagaatctgccagtaagtagaaggaaagccagaagagtataaacctcagaagccacatgaagaaattgtttaaagaatgagggagtagtggttgaatgggtcctgagctacagagagatctagtaagttgaggactgagaactcaccattgggtttcataaactaaaagtgtatagtggctttgataagtgtagtttcagtggagaaaaactatgaaagcctgagtggggtaggttaaaagagattagaagggaagtaaccaacaatgtccgtactctncaattaagaacttaaattttaatatttcatctgatttttgccacaggaatttgaatcaagttttctggtacagcatttttaaattttgngaataaaatggaacctcttanaattgggttctttgggactcatt

SEQ ID NO: 44 - DNA, 742 bp, Homo sapiens
  misc_feature (572): n equals a,t,g, or c
  misc_feature (656): n equals a,t,g, or c
  misc_feature (671): n equals a,t,g, or c
  misc_feature (713): n equals a,t,g, or c
  misc_feature (730): n equals a,t,g, or c
gtcggcacgagcttagctgtgtcttttactgctcttcaactaccacccattcacttgcccccaaatcgagacctccaaaccaccacccaccctaagctaaaacagagaaatctagctctgtgctacttacgggtgtcctcctgccacctcacactggtcatttctaaaacagaacctgtcatttctctctctctgtatttcccttcagtctctgggacactttctatccaagtggtcaaaccagaaacttgagacgtatggtaaatgcttccaccttctgtgccagtacctcatggcagtacttgctttcatcttggtaatatttctcacatctacctctttttttctgaaacaagatttagctctgttgtccaggctggagtgcattggcacaatcattcacagctcactgcagcctccaccttctgggctcaagtgatcctcccaccccagcctcccgagtagctgggaaaacagctgcccaccaccacacccagctaaactttttaatttttagtagagatggggtctcactctactacctgggctttctcacttggaaaattgaactncttgaactcctgggctcaagtgatcctcctctaggccttccaaagcgttgggattacagatgtgaaccaccggacctgggcctnaaatctacctattgnttctcaatttcctttttaaaagtgagaagagtcaagacttgnataagcataaaaagcanaaagctgagtat

SEQ ID NO: 45 - DNA, 266 bp, Homo sapiens
ggtcattgctgtgtgtctcaccagcaagagtgatgttctaatgacattcattacacttagctggcctctgtaggatgactcagatatggtgtccatattgtcccatgtggttcccatttctttttttcttccctcactttgacagcgcacattctctggtagtttgctgggaaagggtatwtkaaaagtaaatttggaggggatttaatttctaaaaatgtctctattacatccttaagtgattgatgtttttatatggaattcta

SEQ ID NO: 46 - DNA, 593 bp, Homo sapiens
  misc_feature (464): n equals a,t,g, or c
  misc_feature (572): n equals a,t,g, or c
  misc_feature (577): n equals a,t,g, or c
  misc_feature (592): n equals a,t,g, or c
ggtggaaggaggaatgaaatgtgaaagcccattggaggcagaatcaaaatgccttggtcttaatagtcaactattaaggagaaattattggctgacttaggaagaagtgaaaaatgtgaaataccaataaaacaccaggcttgtgattttagtcagggtaaagcttaagcattgtgtgattctagatagattactgaggagttttgttccatttattttatgtccatatctttgagctatgattctatcctttatttcttgacatacccaaacattttttaaactattgtgatacagcttttatatgataagtctcactctttgaagtgtacagtttggtggkttttagtatattcagagttatgcagccattaccactacctaatttcagaaccttttcttctttttttagttttttacacataaagatttttaaaagkctttttaatgataatatctaatgnaatgaaattgattatttggaattgatgagacttttaatggggcctatttggtggcaagtttggggttcaaagtacttgcaaagctgcttacttctagacatacttcangtcangctttcacataccgnt

SEQ ID NO: 47 - DNA, 178 bp, Homo sapiens
gggcaacagtcattcctcagcagagtggagagggagacacatgttctgccgcgcccatgttcagtctgttctgtgggcagagttgtaggaacacacttagcccaaatcgatgccagcctggcagtgggtgaagggccagtaaggtttgtctatggctcatgaccttaggggaaaatgg

SEQ ID NO: 48 - DNA, 599 bp, Homo sapiens
  misc_feature (548): n equals a,t,g, or c
  misc_feature (552): n equals a,t,g, or c
  misc_feature (558): n equals a,t,g, or c
  misc_feature (590): n equals a,t,g, or c
gggcatgagccactgtgcctggccatgaaaatgatttttatcagcactggcttccagctctgatataactaaaacctatagttttagtggcacagcttcctgtacagaaagacctcagttcttttttctcatttatggcttgcatgttacagctcaataagggggaaagagctctgtttaggtcatccataggaatgtcaaaaatacctgcgagattaaattggtcatcagaattttgcttgatgagcatgaaacacaacaaaggattttaatgatatcattgaagctttgtaraaacctgctgaaccattcctgatctaaaaagaacactcttttttagatttattcagctgaatctctcttgaataatagtgccagatgattactcaatatgagggaatasagaasgagarggggtgtcarctgctgggggagagttatataccgktaggamcaaagaattatagttggtgktcataaataattataatacagcctagtttgaarcttatgctaatcatctattgctagcagaatatttcaatccntaancccagnccttgagtaaaaaggttcctgggtaacacaanttcttcttc

SEQ ID NO: 49 - DNA, 441 bp, Homo sapiens
  misc_feature (346): n equals a,t,g, or c
  misc_feature (355): n equals a,t,g, or c
  misc_feature (378): n equals a,t,g, or c
ggtatacttcataaagctcttgcgctaattccaaagagaaaaagagtaattttacagtggagaaatctggccaataccaccttaactaagtgatcaagttaacaccagcagtaaaatgttctattctgcatgwtgacatcatgtacacccatgtatgatgtactgaggagggtacaccatcactcctgggacattcctgccaaaaatgcatatcctcagtctgatcatgaagaaacattaggcaaaccccagttcgggacagcatgcaagataattgggctatactcttccaaagtaccaaggtcaagaaagacaaagactgaggagctgtcccaggttaaagganaccaagaanagacaaccactagatgcggtggnatttagttccaggattgaattcctcccttcccctcccctcccctctcttttttcctttccttt

SEQ ID NO: 50 - DNA, 418 bp, Homo sapiens
  misc_feature (203): n equals a,t,g, or c
  misc_feature (230): n equals a,t,g, or c
  misc_feature (409): n equals a,t,g, or c
gatttttatagtgtcactgaggctgagttatggaataacaccttctctttggcccacgttatgtcatttgaactcctaccactctgtgaaatagcctcccctcataaattggacaaacagaatggctgatttgctcactgttaaaactgtgactggtttggtttctttgaatcccaagtgcagtaggcaggagtgaatcatanactcttaatagttggaagggatcttanacatcatcaaatcaaacttctctacaatgwctctgaaaagcaaacatccacactgmttgaacacttccagtgacaagaaactcactatcttacaaagcatccacagggtcaaagcagygktctatttatcaagctgagaactatctcatcctaagkgkcactcactaatctgatcctanaacacatga

SEQ ID NO: 51 - DNA, 452 bp, Homo sapiens
  misc_feature (404): n equals a,t,g, or c
  misc_feature (437): n equals a,t,g, or c
gttaatctgcagaagagttctcctaatggatatgtcatcagatatttaccacattggcataccttcagattgtaaaagtaaagaagtaaaataagagcttttgcattgtgcatatatttattgagcatgtactttgagcacagcagtaggccaagcaattattagatatggggagtgaaaacttacgagacttataccctagtgaactacatcccaagacaaacagcattctgagaattcatcactgcttccacttatttttaatttagaaattttgtggctgkttatggtttctttctttggggccttaatggaaaccttaacccaattataacatttataggtttatataattaaatggattataaatcttttacaattttttatcctaattaaattttaanagggctctcacttatggctaggctggaaggaanggctggtccaagcct

SEQ ID NO: 52 - DNA, 530 bp, Homo sapiens
  misc_feature (401): n equals a,t,g, or c
  misc_feature (415): n equals a,t,g, or c
  misc_feature (466): n equals a,t,g, or c
  misc_feature (499): n equals a,t,g, or c
  misc_feature (529): n equals a,t,g, or c
gcaacagctctagcctgatgaacacgcaggcgccgccctacagcatggcgcccgccatggtgaacagctcggcaggtaaccttggcagctctgcgctcctgagcccctctctctcccctctcctcctcttaggctccaccagtgaatctgcctaaacggcccgagaaggtggatcagttggcgaaagtgggaatcatactacttttctgcttctcagaaacttgctccatctatttaagacttgagaattacattatattttatgtaaattatttttattcaatctgtgtttgkataacaagtggacatawttcaagtattattggagattgktaaatatgcacactaagttctctttctctttgggaattawtagwattggaagawcctcaaawtctctncatttggtagtggnggagacaaacatttcgaattcacatttcaggggaaatcgctggaagggcanagcaagggggggttgaagtctttttacatttanggaacacctctaaatgtatgcttcggaagna

SEQ ID NO: 53 - DNA, 934 bp, Homo sapiens
  misc_feature (118): n equals a,t,g, or c
  misc_feature (933): n equals a,t,g, or c
gatttttagtagagatggggtttcaccgtcaccatgttggccagcctggtctcaaactcctgacctcaggtgatccacctgccttggcctcccaaagtgctgggattacaggcatganccaccgcacctggccccatttaatttatataataaaacaagtgcaggctttacctgattttattctcaccttctgttttcttcttctgcattatctgtcaccatgggttggctcctccccactttctcttttttattcttttctctcttttttgccacactaaattgtaatgtgtttgaacaactctgacttaatattacctctaacaaaaagctggaaactgcacaaatattctttgtaggctctaaaagtaggttggctgaagtatgatacctgaactaattattcatttgtatgcttgttttataagtttgacttccatttcatgatttttttggtagctttatgttatttctgttttcagcaatgggtactttgacatctttctgtctctgaattgaattttcattttgcaacggaagagaagacaacatatttattccataatgaaagagctaatgaagtagaataactattaaattgagatgttttagcaaaaaaacaaaaacacaaaccccaaacgggttgttttgttttatttttttctaaaacatttctaacaattcccagtaggaatgggtggggccagccttcctcatttacaatccagctgcagtgagtcaagatcctagcttattcctcccaattgtgtaataaatgcagaaaaatgatgtgacggtcacaattctcaaatccattgcattgtattccacaaaggatatcctggcggaaggtggaaatatggggagggtaccatgatgtaaagaattgcctgggaaatttccttgagtcatgcatttttgtaaaaccttacnt

SEQ ID NO: 54 - DNA, 499 bp, Homo sapiens
  misc_feature (217): n equals a,t,g, or c
  misc_feature (493): n equals a,t,g, or c
gctcgtgccgaattcggcacgagtgatgttcaacttgtaaatgtgttgcatatgccattatgtttatacattcgtctgtacacactgtttttattaggagtgatatatcacctcacttttgcttgactcctgtatctcagaaaagtgatggcatttcttattctcttcagttctatttagcagacatttactgagtattctgttgttgttgttgaangtagtgtgcaatatgtttctaatatgaatgtaacaaaaagaacctgagaatatcaatgaaatttaggtgaatacttaattcctggtgatcaaagctaatgggtgktctaatgaaaaaaagtctagcctatcatggaataacagcagaatctggagcaataaggcaagaaataattttatttttcagacaagccacattattaatgaaaacatgcaccacacatgaataacattggaatawtacctctttcttgaatagcagtgatgagawggcctnctctga

SEQ ID NO: 55 - DNA, 770 bp, Homo sapiens
  misc_feature (673): n equals a,t,g, or c
  misc_feature (678): n equals a,t,g, or c
  misc_feature (679): n equals a,t,g, or c
  misc_feature (734): n equals a,t,g, or c
  misc_feature (743): n equals a,t,g, or c
  misc_feature (752): n equals a,t,g, or c
gaaaagatcaagaaagcatcatgtatatctcaactgaaaaaagaaaaagaaattagggagttagcttctccctgtgccctactttctgtggccatgccttcggctctctctgtgacaatccattgaacaaggttcttctaggcttctgcagctagggagaaagcatgtgataaagaacagaggccataagtgggcaagagtgtgtcttttctctgtaatgggaatttaaatttagggaaattactctgccagtttgattattccacttaataaaaagaatttagccatttttcattcacaagactattcaagtacaatccacattttaccttcttggcctggggaacagaactcttctgaatagartacagagggctaaatacaatatcccagaaaagtaggaagtactcctarcaatttgcatgcagatagctctccattatgcatgagctgcttctttggtttcgaatgatcagtgtctccgctgttctttcttctcccttctgtttccaccatattggcatttcactgctcattaataattgtgggaaggaaaaararaatgcattaattgaagactgcatcaatcaatacacaactttccactggtgkwaaagtctggtggcatttttaaaaaggtagatatttttggattaaccatacccagtgggangtggnngaagcaggttgtgagtaatcttcttccatcatcagaggaatggagataggcaatnccagctttnctggggacnttaccaaatacccctaaa

SEQ ID NO: 56 - DNA, 387 bp, Homo sapiens
gcagctaggaagataagttgaatgcagaggagagggaggatgatgagaattggagtttcttattcttctcttaagaagtaccagggccctagcaaagaaggaaagaaggttgaaggattgccacagatatttcatccatataatttcaaaggcataatctaagagcaaagtacatttctgttttttatttgtttggatttgagccacagatgcaaagtagatcatgcagtcgtctgtttattcacagttaatatttgcttcctttttcaagaacaccatttaataggcaaaatataacttataggagcctcaagaatgggaacatctagtaaagtagttaccctatggcccaagagaattctgggctcaggtgaggttcagtgtctt

SEQ ID NO: 57 - DNA, 526 bp, Homo sapiens
  misc_feature (446): n equals a,t,g, or c
  misc_feature (464): n equals a,t,g, or c
  misc_feature (490): n equals a,t,g, or c
  misc_feature (495): n equals a,t,g, or c
ggcagttagagggcctgtctcgccacagcctgtcaaggctgcgttctgtccacaggactcattgctatggatgtggccttgaacacctggctgactgaggtggtgtttgccaagtttctcctcagtaaagttattttcctcctttccgtactccactcgttagaaactgtccctgtgaacggccatacttgaggggtggggagcagcgtcctccctgctggaggaggaggaccacaggcattcctcggactcgtggcgctgggtatttgtctattttctgtttattcagccactgctttatatcagtctggactcatgcatgtttacttgatgcttcgggttataaagcartactattttattttcctggtgtggtccttctacaactttgtcacactcagttagataracacactttattagcttatgaaraaccagtttattgnggccgtaaattggagtgnaagagaagtggtgatgcggctacctncttgnagcttcttttactgctggctggatacagtgc

SEQ ID NO: 58 - DNA, 1114 bp, Homo sapiens
  misc_feature (544): n equals a,t,g, or c
  misc_feature (562): n equals a,t,g, or c
  misc_feature (966): n equals a,t,g, or c
  misc_feature (1026): n equals a,t,g, or c
  misc_feature (1078): n equals a,t,g, or c
  misc_feature (1102): n equals a,t,g, or c
  misc_feature (1108): n equals a,t,g, or c
gtcacactccctttaggtgggacaggcccgccacagtcagagaacaggtgccagggaacatgaccagcctcttctgccaccactccatgtagaggaagtgatgggttcctggtgggcctcccaggcactataacccaggggcaggtggtcaggcaaaaagccttcctgcacaaggactccagctctatgtgtcttctaggatctataagtaccaggcccacggctatgccttctcgggtgtggaggarctgyttactactgggggagtccacctttgttaacatgacccaggactgaataaaccatgctcgccaccaggcttctttctgacccctcatgtatcaagcatctccaggtgacctactgtctgcctatattaagggtccacacggcggctgctgcttttttttaagggggaaagtaagaaaagagaaggaaatccaagccagtatatttggtttatttattttttttaagaagaaaaaagttcatcttcacaaggtgcttcaaacttgggttcttaactagaaaccagaagactacnggagggaatataaggcanagaactatgagcttattttawtactgkttttcactacctactcccacaatggacaatcaattgaggcaacctacaagaaaacatttacaaccagatggttacaaataaagtagaagggaagatcagaaaacctaagaaatgatcatagctcctggttactgtggacttgatagatttgaggtacctagttcagaactccctagtcaccatctccaagcctgtcaacatcactgcatattggaggagatgactgtggtaggacccaaggaagagatgtgtgcctgaatagtcgtcaccatatctccaagcttcctgggcaaccagtgggaaaagaaacatgcgaggctgtaggaagagggaagctcttccttggcacctagagggaattaagccattctcctccnttatgcaaagattgagggatgcaacaatattaagaagagaagcccccagatggtagagancagcatatcttacccctagatgtcaacccagcaggaggaaggagaaggtgtngggaggatctcagaggtggcgggnacttcncaccag

SEQ ID NO: 59 - DNA, 700 bp, Homo sapiens
  misc_feature (658): n equals a,t,g, or c
  misc_feature (669): n equals a,t,g, or c
  misc_feature (674): n equals a,t,g, or c
  misc_feature (687): n equals a,t,g, or c
  misc_feature (693): n equals a,t,g, or c
gctgctttgtaattagtttcaattttaaaaagatccatgttttcctgaatagaaaatatctttcgaaatgaatagaaaacatgacattattaggaattcaattctggtgttttccaatacattaagttttgcctttatattttatgtaacaaagtaatagctttacaaaacactctaggtaattttaagatcacatactatctattgtatctggaatttgcagagtaatgaggatgcccttgaaatggcttcatacctctccgatttgctggaatattttaatattyttcttctaatctgtttcttgagaggcactatgacctgggttgaaagcgtggctggatgtttccatttccagcgatttgattttgggcaagtggcttaacttgtggggatttcgatttcgttatctttaacctgagggtctgaggctaaatggtttctaaggyttctttcaattctaaaaatctgtttccaaaaaataattcctcagttttccaagtggcataactcacccttatctatactaaagaaataatacatgacagtagattcataagctyatggcaatatggctttctaatctattggaagaaccattatgtggctkaagaacttcagaaaattggggcccttcaaggatattggaaaaattggntaaattggggntttcnttttttgagaaanaaccanaatggtg

SEQ ID NO: 60 - DNA, 887 bp, Homo sapiens
  misc_feature (745): n equals a,t,g, or c
  misc_feature (747): n equals a,t,g, or c
  misc_feature (801): n equals a,t,g, or c
  misc_feature (849): n equals a,t,g, or c
  misc_feature (882): n equals a,t,g, or c
gaagaattttaaaggaaggtgggtgccctaaaaatacatttatgccaactggattgaatcaccttgaatcacaatgagtacaacaactgctaatgagctaacacttaatgagtaatgaccaggcaccagacactgttctagcactttatacttactgatttctttactcttcatgataaccctatgaggaaagtgcttttttgttaagctccattttcagctgaagaagctgaggcctggagaagttacatagctttctcatggtgtctccactatgaagtagctgagctgagatctcacccaaggccctgcagggttcaggccacactcttaagtactcacagctgcatcacactgaatatcatctccctgcactgccatttcatttgagcagggctttgcctgtcaagaacattcatatcttttgataaacagtgcattttttccctgatagtctgtatgggacagcctccttgtttgcatctgaaggacagggacttcaggacctcctgctgtggtcaccaaggaatcacattcaaacttctcagcaaggtgktatggcctttcagtttgcctacgatccattgaggcaaggttccttctctcaatacaccctctgctttagccagggggacctyccactgtcctctctatgkgttctattkgttcctgactgktagtacccgcttgkgtggkttccatgatccttcttctgcctggaatgaagctcctcttgagtcctganancttcatttctgtctgtcttttgggctgtgccaaagcccctctgccttcgtggantccccactgattcattaccaattttcctctcctctgggctcttcttanatgcaaattgtgcctctggatgggttacaaaanttgca

SEQ ID NO: 61 - DNA, 445 bp, Homo sapiens
  misc_feature (386): n equals a,t,g, or c
  misc_feature (389): n equals a,t,g, or c
gcggcacgagcacactttgtactgtatgttcaaaaattaaactaaagtcctgcagtttggcctgtgttataattgaaagaatgtggtagttcactaattgaaagatgtgaacttatttatgtggtcagaggcatatttgccagatgttattaacaacccagaagtacgcaaggataggctgcttactctgacatccagcacaaagctctgccctccatatgcccggtgatcttggcatgccttccacactccatcaggcagagaccagtggcagctcaraaggcccagtatgctgktttgattttaaaatttaagtttgcttttgaatatgcagtataatcaaatagatccaattctgaaaggcacaaaagggaatataataaggnctnctttctatccttgtcccaccccttcaagttctctcccagagacacccatatctctg

SEQ ID NO: 62 - DNA, 641 bp, Homo sapiens
  misc_feature (633): n equals a,t,g, or c
gaacttgcagtgccacagacaagcaccagagggatcgagagattacaagcaactgaaaagaaactggcagacctctctaattgggacattccatgtacaagcccagagaagattcatccccagaaaaggtttgagaggccccagaatctctagctgagctgattggtgaagttcttctcctgtaccaagccagtccataaagactgggagaggtggctgttttttcagataccccaaatcccagcaaaaaataatgagacatatgaagaaacagagaaatatggcccaattaatggaacaaaataaatctccagaatttgaccctagagaaacagagataaatgaattatctgacaaagaattcaaaatgatcatcttaaagaagcttartatgctgtgagagaacagagatagtcaagcaaatgaaatcagaaaaaatgcaataacaagaatatcaacaagacagaactatwaaaaaagaaccatacaaattctgcatctgagaaataactgaattgaaaaattacctagagggattaaaaagctgacccagtcatgcagaaraatcgkcaaactcaacagctyawttaaattgatcaaatcagaaaaaaaaaatgaaaagtaaagcctaanggaattat

SEQ ID NO: 63 - DNA, 641 bp, Homo sapiens
  misc_feature (586): n equals a,t,g, or c
  misc_feature (600): n equals a,t,g, or c
  misc_feature (623): n equals a,t,g, or c
  misc_feature (627): n equals a,t,g, or c
  misc_feature (641): n equals a,t,g, or c
gtgtatgcatttttgtgcttttcttttagaaacatgatttatagcaacatttttcatgaaattatacatttccaattttgcaatgtctctgacaacaggaaaacctgattcatttaacagatacgtatacttcataattagcactttggaaaggcatttgttccattcattgttgtgttctttgagctgagaattttgaaggaacttctttagaagttctgactttagtcagaaggggatagcaataacatgtaacactaacgtagcattactatgtgccaagcctattctgagacctttaccatggtttactttgttgaatttttacagcaatcctgtgaggatgtgtactggtatccctgttttacagataggaaactgagggtcagagaggtaagtaaattacctaaagkttctatacaactagtaagtggaagaactkagatttgatcccagcagtctggctttagagccatgktctttaatccaaaagttaatactgrccttataataataagcttaataccgccacatagkggtttggatataccaggcactcttcttaaccacttttatttaaattcanttaaattcttacanccaactcttttaagggctttaanggtngcaggttttggcan

SEQ ID NO: 64 - DNA, 655 bp, Homo sapiens
  misc_feature (237): n equals a,t,g, or c
  misc_feature (569): n equals a,t,g, or c
  misc_feature (571): n equals a,t,g, or c
  misc_feature (581): n equals a,t,g, or c
  misc_feature (591): n equals a,t,g, or c
  misc_feature (648): n equals a,t,g, or c
gacaaaaacaaaagaaaatcaacatttaccacctaccccacccacctccacacctacactcatacatggtggcaattccaggyaaatattttgttttaatctgaaaatttataacattaaaggaaattgtgtggygctgttttactgcttgaaaagccattttaaatattctctagaacaaatgatattctctaaatattctctagaacaaaggaagtaaatttttaaataaatagncacatttggcgaggaaatttcagacaccaaactttttttggggaatagagagaggcattcctccccaaaggagatcataaccggggattgcaaggggtcctggtgatttaacaagaaaggaaggcaattctgtctccaaaataaaactgcaatagttcctcaggccagtgcatgttggcatgctgtatggtcagccatgtaggagagagctccaagccttgggaccatacagctcaggactggactcaccactcagctcaggactggcttcatgggcattcacgctggcagtaatgaagggcccacacttagaagatcttacattggttaangnttggttttgntatctgaaancttaatctttgaacaaggggcctaaaactttaatatgcatggatttcacaactatgnactgggc

SEQ ID NO: 65 - DNA, 634 bp, Homo sapiens
  misc_feature (292): n equals a,t,g, or c
  misc_feature (516): n equals a,t,g, or c
  misc_feature (553): n equals a,t,g, or c
  misc_feature (608): n equals a,t,g, or c
  misc_feature (629): n equals a,t,g, or c
  misc_feature (631): n equals a,t,g, or c
ggagagatatcatcccctgtaatccgggaggcagaggtgacacggactgcacggaaacagagtgctcagaaaagagttttacgtatcctttgcgatttaagcatcattataaaaattgtaacatgtttggaatcagtgttgtagaattttctttttataagagtattaaatggtagctataataaaatcctgtagaaactttttttcactccacagagctgtcatttggtaaatataatgcaaaaatttaatgagatcgtatttccctaaaaataaagatatttcttactgntkacagcttcttgctgagaattagattcttttaattatttgaaaactgactaaaacatttagttcagtgtgtagttatctaagactgacatctgatcatttaaatggcagaagcaatgaattatttaccctttgcattgaaaaatggtagccctaaaatacttgtcttgaaaaatgtattcacataatttggatagtaaaaagatggttaattctcaatttagngatctcttttctacatggaaaacttttcttaactcgntgtacagtcaagcatcttcaagatgaaaaatttggaatactacaccaggaaaacngggtatcccttgacttcctantnatt

SEQ ID NO: 66 - DNA, 397 bp, Homo sapiens
gttacttgctaaaaataattaaaccctccagctattgctctgtaactatttaccttaatgtgtaagcttcaaaacagatagataacgttgtaaattgttgtgttagaaatgatgagacagagtggaaagtaactgggggaggcagctctatctagagttgtcacagatgtcccagatgtatgtttgccagtttatagatgtaatttctcaaatttaaaagcaggatatttgaggataagttgcatgtgcataatcttcctcctgtgtaattaaggaatttgggggggcattatttttaattttactatattgtacttactagctttaatgttgttgtgtagagcagtgtcacctttagataaacagcatgtacttaaaacagaaggctatgtttaaa

SEQ ID NO: 67 - DNA, 574 bp, Homo sapiens
  misc_feature (511): n equals a,t,g, or c
  misc_feature (515): n equals a,t,g, or c
  misc_feature (524): n equals a,t,g, or c
  misc_feature (546): n equals a,t,g, or c
gttctgtctctatgaatttagctattctttctataagcttttaatcaggcagcaagacagaccgttaatatatggaactgggaagtctgtgccccactctgatgtgctgtgagatgtttcgttcagtcccatggatggagggattgatacctctgtaccctactgctgccaccccccactgcccgggctaagtgtgtgagcaggacatagacacttcaaatggtaatgaaagctggtgtctcctgctgatctggagggcttcctaaagatgaaggaccaaagtccctggagagttgtcatcgccttgaaaacacaagggcttagaccactgctgtgacccttcaccagctgtttgcccaactcctgtttgacacagcargttttgctgcatcatcaagtccagacttggcatcaaaggcctcaacaaaaagctctcacatcccttgcttcagccttccaacttgctaggggtgcctgatacctgatggttaccaaagagatactgacttgntttnccaggaagngggttccgttttttccaatccnaacaattgaccgagtaaggaacctgggg

SEQ ID NO: 68 - DNA, 401 bp, Homo sapiens
ggatcaattagaacagagatgacaggcacaaagcactcgtattcttccctcactgtgtgtcctgaacatgcttgtttttcaacacagatctttcccctactgagctcagacttggtgctagttcctctgtcagcagggcacaccaggcagatatggtcaattacttaagatgcaactattttgaaatttctttttcccagagtagcatcatttactgctctcgttgtgagtcttgagttttgtcccacagcttccaagttctcagatcacatctctgagatgccatcagaccttcgcctcatcccaccatgcatggggccactctctaggccctcacaggcagttggtgaaatgagtgtgtgtttctccttgagggtttcatccacggtctcttccataga

SEQ ID NO: 69 - DNA, 302 bp, Homo sapiens
  misc_feature (291): n equals a,t,g, or c
gtctgagtcattttttctgggcctctcagtgatttctggtacatgttaccatcccaggctgtcaaccttgggcaatgtgatttccagaaggaccttggcccagcccatgccatctgtgagcagactaaatatgttcagaggccgggggacggcaagaccagcctcaccatctcatacatggggtcacgttttttcagggacacagacacccaaagctcatggaaaatgtccctgtaaactgagtcccgatttcctgatttttctccttggtccccaaacgcttaacactgnaatgagggcag

SEQ ID NO: 70 - DNA, 537 bp, Homo sapiens
  misc_feature (316): n equals a,t,g, or c
  misc_feature (507): n equals a,t,g, or c
  misc_feature (520): n equals a,t,g, or c
  misc_feature (523): n equals a,t,g, or c
  misc_feature (524): n equals a,t,g, or c
gtcttgccaggagagttcttcctaagtcttaagatattaaagatttcatgagaaccgcatgaagaatatcttcttgaatcatttacatttttcccttttgtaggcttatgtaaccatgcagaaaatctaataataagtgtgctattagtgtaccatgtgccatcccgcaggcagctgtgccatggggcaccagtgcccagggcttgtggatagcattaacctgtacaactttctaaagtaaagcccagtgggaaatctgtaggtaattgaacagatagtccatttttatcaagacttccccctgccccttccctgntctgtcttttctcttttcttggccagaaggaaacaccttggccataggcctttcattcacaatggagtatattttccaaagcaaataagcttggactatttcaattccagagcaatctaaggtgggcacacagagcttaatttgggtttgaaagaactcttaaattaagatcataggaaggcaatgagcangaaaaaaaaaaantanngatcccagcattg

SEQ ID NO: 71 - DNA, 294 bp, Homo sapiens
  misc_feature (24): n equals a,t,g, or c
gcagtaataaaagattgttattgncttcttaactaacttttcacatgattatcttttccacaatctcagaaatccaggaattgaaagaatctcaaaagtcttccactctatttttatggggaagtaggagaccaagaaaactgttttacctagaattatacaactgagatcaatcgtcattatttttaaaggatcttgaaactttataagattaaaagggatgccaatggtgtggagtaaaaagatcctggacttaggagttaggcatcggccgggagctgtggctcatgcctg

SEQ ID NO: 72 - DNA, 535 bp, Homo sapiens
  misc_feature (380): n equals a,t,g, or c
  misc_feature (433): n equals a,t,g, or c
  misc_feature (469): n equals a,t,g, or c
  misc_feature (510): n equals a,t,g, or c
  misc_feature (533): n equals a,t,g, or c
gtgtctcttgatgaaaaggttcctctcttgggaatcaggacttctaattcacaaagttgcggggatgagaagtccaaactccccacttgggtcactgggagtgagagtatgtggttatattaatttcctatcactgctatgacactatgaacttagtggtttcaaacaacacaaatttattttcttacagttctggaagcctaaaatcaagatatcaactggactgtttttcctgaagtcttcaagaaaaagtctgtttccttgcctttttcaatttctagaggctacctacatttcttggctcatggccccttactcatatcaccccatcctcctgcttaagtcattgcatctactaggcaaatctgcctctctcttgnaagaatctttatgattatattgggcctattggatagtccaggataatctctgnatcttgagatcattaacttaagcatatccacaaagnctcttttatcttggaagtaaaatattcatagaatccaggantaggatctgacatatttgggggnca

SEQ ID NO: 73 - DNA, 742 bp, Homo sapiens
gaagataataaaatagaacatgaagggctgtcagtcagtgtaggtatttccatcccctcacttttcaagtgaggtcacggaggctcagagcgataaggagacttgtccaaggccacacaccggctggtgctcaagccgggacttgaacccacgcagtctgactctagagcccaagctcctaactatgacatcctatttgatacactgttttactggagaaacagatcatttgacagacattctttctgttagcaatttgacaactctttccccagttgtctgtactgaacctggcgctgtgctccgtaatggtgacctagctgtgaataagatagaatcaccttaaactcagaggggtaatgttctgttggggagggagaacctagttttgcatgctaagtagaatgatgaatgaagtatttacaaagggagcatgatgactgatatgattcattggtatatgtattaagagcctatatcatttcactcattcaaagatttagtgaattaagaatagaagcatgggaacaagtaaagatattgctcttgcagaacattttccactgaaagctcatcatattttcctcttttgtgaggataaagaaaaagtattatttctacatggaaatttgatgtaatacatttcaaccctaaaggcttttaatgattgctggaatctctaaaacccacttatgaacttctcctttagggggcaggactcagaataacaatagtaccactt

SEQ ID NO: 74 - DNA, 649 bp, Homo sapiens
  misc_feature (639): n equals a,t,g, or c
  misc_feature (646): n equals a,t,g, or c
gcttaaacatgtatcgaagcagaacgtctaaactaatataaggtttcactcatttgcactctccagggagagaaagagagatgaaaactgtgaggggtgaaactccacagaaatgtaactccaccccaaccccatccttgcatatttaccaagaaatggaatttatcatttctttcctattttaggtcttttttctgtcagagattttctcagtccattggtatgtgaaaagtacattgaggaaaggtaataagatcattcaatcaataactgctttattccttcataacatawttgkttaataagggaaaatattgaataagatatataagaaaattgcaatcttctctagcttttctaggaagtgggatggagaaaatggtttgaatttaaataaaagtgaatttagagcaataaggaaaaccatgtaatgaagatcaatactaacattatctattttttattgatgagaaaaatatagcttggagaggttgaatgactaggcacagcttactcarawggtaagtggggaagcacagttaatctarggtyagttccaaggcatgrattctattgacccagcatagctacaaactgctgcatactttctagttcacctcctacatactgaaatctttntgcttangcc

SEQ ID NO: 75 - DNA, 531 bp, Homo sapiens
  misc_feature (217): n equals a,t,g, or c
  misc_feature (502): n equals a,t,g, or c
ggtatcttattgcagttgtacctttcctattcccacctgagagctcccactcctttggttcaacccagcttccatcaatcattcctcgagccttgccaattttttgtctctcttccatgtttattgtcgctacctgagtctagacactcttgcgtgccatagattctgtaccagggtttatcgaatagctcagtaaaccaatccaggatgggctcangagtggcccagggccgagttcaacgctattgcctctaacaaataggcctatgattttgatttactagaaaatgctgttgattctgatgaaatccaagttagcactttgtgactttcttatcgtggccatggttccggcgcttgtttgaaatatggttccttgaaaaggtagaatattttaaagagtgtgtttcatgcaacgtaaattgtgaattcctttagccacctcctctctttagaaatagtactcacacatattttaaacataaattgacaaagatggcanagacctcatcttccctgtagcaaattgaa

SEQ ID NO: 76 - DNA, 521 bp, Homo sapiens
  misc_feature (231): n equals a,t,g, or c
  misc_feature (485): n equals a,t,g, or c
  misc_feature (509): n equals a,t,g, or c
gccaagtgggtcttccagttcagtggtgaaattcatgagggggatggggggtgtttatagatgagcttgaggaggcagtgtctgatttacatagggcccagaagattggtcggaccaggtgttccatttacatagggcaggaagaagctggctgcccattccaaactttatcatgcagtaaggtctctacctgctagcgccatgttgcagtacatttactgtacatgtggntaacaaaggaaagatggagctgccatgttgaacatgcctggccccctagccttttcctattggcacagcttcaggcattcacccatgcaagcttccagcttgcttatctatgtctccaactcaattttacaggctgctctttggtagaaaagaaattattttggggctgctttttggtaaaagggaagccttactgaggactctcttactctactaatcttctaaataatggctttttagctccggatcaacanggctttgtcttgttgccaggatgnatgcatggcact

SEQ ID NO: 77 - DNA, 544 bp, Homo sapiens
  misc_feature (390): n equals a,t,g, or c
  misc_feature (478): n equals a,t,g, or c
  misc_feature (508): n equals a,t,g, or c
  misc_feature (512): n equals a,t,g, or c
  misc_feature (532): n equals a,t,g, or c
ggacaacttgagaaatcctaggagtaatttgaaaatcaaagctttagagaatcacatagcgcctttgaataacaaccaacataaacaaaaagtgctagcagagtgattccaaaacaccagatgctttcaaacactgtcatccctataattatttttataatatttctatttgtttctaattataaaactagtacatgcttattttggacaaattggaaagtacagacmaatagaaatatgaaaacmmaacmtatcattgttattcttagaacttttttcagccctagattcagtactaggctcatgtgagatttttagcacagagttcagagacatggcatgaaaactgtcccaaaaagtcatggcaataatgggtgtaaagaaaatagnttcttgggtatttgtaaccgtacaaactatcataaaaattctcctctttcgcatctcactttggctcttctaagtcgggcctcagcancatagcaagactctgtctcaaaaaaaaaanaganattcataggtaatacagggnaatgggaatata

SEQ ID NO: 78 - DNA, 615 bp, Homo sapiens
  misc_feature (569): n equals a,t,g, or c
  misc_feature (606): n equals a,t,g, or c
  misc_feature (609): n equals a,t,g, or c
  misc_feature (611): n equals a,t,g, or c
  misc_feature (613): n equals a,t,g, or c
gaattttaaaaaacccattgtttctttttgtcttcccttgataraatataatcttcctaaracgargggtctttgcctgttttgtttattcctgcatccccaaagcctgagatgatgtctagaacatagtaggagttcaacaaatatgtgttaaatgaatgaatatgcttcacttctcatagttgttcttccaaaaatatctctgcctaacactaactattttgcatacatcttcaagtgtgctgctttatggctaccccaaagaaagacaaccaaaaaagttttgtgaatagttgcattcaactcttaagtacagaatgtctggaatctaatctccaaattttctaatacataaactgaaaatgttaaaatgtatccgtaaacattctatataaaatattgggagaagagaaaacaagagtatgatacagtaaaaggagaaattcaggtagagactataactcttgtttaggtaactggtcacaagattgcaccactgcatcccagcctgggcgacagagcaagcaagactccctcagaaaaaaaaaaaaacccaaaaaccgaataangatgacatttcttaactttccttacagccaggtaaanccntntnag

SEQ ID NO: 79 - DNA, 538 bp, Homo sapiens
  misc_feature (504): n equals a,t,g, or c
gctggaactctaccacacctggcccagttaattttttgatgagtgaatggtttcacaaggtaggtgttgtttctgtgttggcttccttgatcaagataaggaaattcatgacacttttcccttgaaaacaattatgttcaaaggaaaagagctggaatctggcagaatctgaatttgaattcacatttgtctgattatagagcttcttaaccttttttgtgttatggatccttttggcagtctggtgaagcctatagaccccatctgagcataacattttaaaatgcatacgtggccgggtatggtggcttacgcctgtaatcccagcactttgggaggccaaggtgggtggatcacctgaggtcaggagtttgagaccagcctggccaattagctgggcgtgatggtgtgtgcctgtaatcccagcacctcggaaggctgaggcaggaaaatcccttgaacctggaggttgccatgagctgagattgcgccactgcactgcanactgggccacagagcaagactctgtctcaaaaaa

SEQ ID NO: 80 - DNA, 803 bp, Homo sapiens
  misc_feature (66): n equals a,t,g, or c
  misc_feature (69): n equals a,t,g, or c
  misc_feature (72): n equals a,t,g, or c
  misc_feature (650): n equals a,t,g, or c
  misc_feature (714): n equals a,t,g, or c
  misc_feature (720): n equals a,t,g, or c
  misc_feature (788): n equals a,t,g, or c
  misc_feature (792): n equals a,t,g, or c
  misc_feature (803): n equals a,t,g, or c
ggttttttttttttttttttttttggcctgagataaaataatttcctttatctcccacttaaattnttnttntacaagtgctgactagctcttgctagttttatgtaattgcatggaaagttctggaatacctctctggttgcacttggtggtgaagttattacacaaataaatgccaggaagtcagttatttgctttcctattactatgcactgttggaggcattactatcgtctcttgtttaaataaatttcaccatgtcttcacacccccaggcctaaattaaatcaaagtagttttagagctcaaggacagaataagtcactatgggaaagtgggacaaaggaaatcaagcacgccagatggaaagttcagactggccagtatctttaaaatgtcagtgctgtataaaaaggctttataagccatcagtcaacgatggctctagaaacaggccagtggctacagaaattaggcttttttcactaagccttgaaaatttattttcaaagtgggttgaattttaggtcatttgtgcgggtatatctaatgaagagaaaaacaaagtgatggagaaggaatttctaataagatcttagtattcattagaaatataacctcttgctttcataattaataggatctgaagntaatttaataaaaatttgacttatttactaaaacaggcaagatttgaacctggctttattaagnttttanttaagttacatgttgttcaaacaggattaaaattaagaattaaaaatgatgttggctggattttccanccantattaaatctn

SEQ ID NO: 81 - DNA, 400 bp, Homo sapiens
  misc_feature (386): n equals a,t,g, or c
  misc_feature (395): n equals a,t,g, or c
gaggtgatgaaatacacattgaactagaggttacgaagatagtcagggctggagatgtggatctgaagccacagaagccagtagaaagagtgagactggtacatttagagaggtgcggggaaaagaaagaggctggagaaggagaccacgatataaatcagtcttaggaaataaagaaaaatctttctgcacattggagatgacagatttgtaggccatgcttcagacacatacctatacatattcatgtttgtatacatattcatgtacatatttatatatgkattcctatatacattcatatgtattactgyktgtgtttgtatatgyatcttattctgagcatgcgctgktctcttatgctcacatatgtattcttgagagcnttttccacntcagc

SEQ ID NO: 82 - DNA, 639 bp, Homo sapiens
  misc_feature (638): n equals a,t,g, or c
  misc_feature (639): n equals a,t,g, or c
ggytattttgatttcactgaatcctaattytcttttcttcaaaatttttgaacattcagacaaatgtgccacttaccttgcacatttgtcttaaggtctaaagggataatctatcatttttgacatatagaggccctcattaaatgtttgytctttcttatctctcaaaaatatctaccataatactttgaaactaagctcaatacataacaataaagttatatgatacccaagacactgagggcctgaactaggtagtgttatgaattaaaaggaaaaggtagatgttgaaaaatgttataagctagaattgatatgagtcaataattttctggggagaagaatgactgagattttaatcctaggaatattatgccatttgattaaaaaaaaagagagaccaagaacttgtttgaggaaatgagtcaaaggaagtaagtctaggcaacaccattctaaacgaaaagttataggagcactagtattttcataggcttcatggaaatgatctggagccccagtcatgaaagggtgtgtttaaaaaaaaaagcattgrtatttatgaacttgartgtcagtttcaaactttgactgktaatagtggaaaaacctggttgacagaacaagacctgtgtccnn

SEQ ID NO: 83 - DNA, 655 bp, Homo sapiens
  misc_feature (603): n equals a,t,g, or c
  misc_feature (639): n equals a,t,g, or c
  misc_feature (649): n equals a,t,g, or c
gattcctcacaaagggagctttgaggcccggaagaggcctttccttgatgatcgagctgtgcacagggagcaaaccccaagccgactgcttgtctgtgccaccctcaaacaatgatttccccaaattggacagcctgggtttgtatccttgagcacagttttgggaagagcattctgcatgaggcattgtagctatgtatatggagtataattctgttttcaggttgctctgccacagaggttaagaactccctcttccaaggtagacattgagaacagagacgaccacactgggttttcactgcagcttttaaacaggatgactcccagcccccatccccgtggctagcagcaagcagggactctgaaacactgcaagccaatggactgagcatcttacttttgctgtccgtgttttggtgttttgtaaacccatctggtaatgaccctgatgccccatgtcccagcaagggcataggtacctgccattgtgcaccaaagtccctttcctcatggccctggctgttctcctgcatggggtcatgtgtgtcccgttaccaagttgtggccccttttcaaccttgagtgccacatctgggctgntgtaggcatggtagtacaagctgggttggtactctnaaaatgaaanggagga

SEQ ID NO: 84 - DNA, 137 bp, Homo sapiens
  misc_feature (130): n equals a,t,g, or c
ggcaacctaaggtaaaattttttaaccaaatttaacccattcccaatcagattgaataaatgcctagcagcttatgtgttgtgctaaaacacgatatattatctgccaataaaaaacagtattttgtatntatatag

SEQ ID NO: 85 - DNA, 613 bp, Homo sapiens
  misc_feature (554): n equals a,t,g, or c
  misc_feature (592): n equals a,t,g, or c
  misc_feature (595): n equals a,t,g, or c
  misc_feature (610): n equals a,t,g, or c
  misc_feature (612): n equals a,t,g, or c
ggtactgacatgtacataaggtatacacataaggatgtctatcatagcagtgtttttattaggaagatccaaacaaaacaaaatagaagtggaaagctcttgagtgttttgcagtattcggaggactagttaaattagggtacatctgtggaatagaatactttttccagttcttaagcagaatgtattagattggcttgcatgcatatggaaagctctttgaaacatattacgaataaaagcaagaaatagtatagcttgtggggtaagtgtccgtttgtgttttaacaaaatatataaactagaatttatacatgttgtctggaaggatgcacaggaaactgttgatggttatctctgggagcttgaagtgtgggatggataatgggctgktttaatcttatagtcccttttgaacagtttgaattctggttattatgggcatgtacaattttcacaataaaaaacaaaggttttttggtttatgtgcattacttatatttttttcttggattttttccagaattctcttgcactttggtttggtgtgatgnttgggaactcaatggtattattatgctgcttctttggnaantaattgggtaaatantnc

SEQ ID NO: 86 - DNA, 421 bp, Homo sapiens
  misc_feature (311): n equals a,t,g, or c
  misc_feature (350): n equals a,t,g, or c
  misc_feature (381): n equals a,t,g, or c
  misc_feature (384): n equals a,t,g, or c
ggtggaccagaactgagtctccatttcttactgccctgtggagtcttgggtctaaatatataccatgaaatgccctggccttgcatattttttttacttcttgataatagaatcttaaattgttttgatcttgttatcaaggtctgggagacaagtctccacatcttttcatttaatctttattaaacctgtttttcctttttttaaaaaaaaatgataaccactttttgaactttaattttactatatgaggcttgactgtctacactggcataatcaatcaattcaatcagaaatccaattaaatttgntctttgcatcatagaaacaattcatctgataatcattgngaatttttactaaattgatgagctattatgntgnttaagatgaagtcagagggtcactacatctttgactg

SEQ ID NO: 87 - DNA, 790 bp, Homo sapiens
  misc_feature (683): n equals a,t,g, or c
  misc_feature (741): n equals a,t,g, or c
  misc_feature (743): n equals a,t,g, or c
  misc_feature (786): n equals a,t,g, or c
aagtcttgtggaggtagttgaaatgttacatttttgtttttggtgcgtgataagtcattaccctaattttgacaaaccatggttttgagtttataattgatatccattagacttggatttaatatcagcacatttagacttagacatttgtaatatttgtaaatttatagcagagtccatatacaagtgtcagaactagtttttatgatgtgtggcattagtgaagtaatatgccatcagttgctccttgttctttctttttcccatttatgtcatccatcagattttgatggtcctccttgtttagcataaatacttcacatgaccttgaagttggaaataagagagttaccattttaatgccatgatgttatatagtccatcagtgatgcattttttaatagagatataccagccaataaagctcagttgtgttcctccaatgtgtattttctactataggtagtttataaagttttagctataagaaatgctttttgtgtgtctgattttgaattgttcctggacaggcaaatcacttgatttctaaatgccagggaaaatgtccatattgtcagatattgckaaggcattatttgatatttaggatgctttagagattttgcagattttttcttatgggagcattttaatatcttaaagtgggaaattttaatatttgntagtattaaaaattttttttaaactttttcttcccgtagaattataaaacactatagntnttttcttttctttttttaaaaacattctgtgatcttgtaagtntgat

SEQ ID NO: 88 - DNA, 539 bp, Homo sapiens
  misc_feature (453): n equals a,t,g, or c
gctgctgtgagccctarcaggacagagcccagactgtgtgctccctgcagcacagtgcccctatgccagctaggagctcagctagagtgggttgcacgagtcgtgagtttggggtcaacctattcctactaataagcactgtctacacctgagagctattcctgaacgattttgtggkttagagagggccatgatgaatatgtttagagtactgataaaatgtgcttcataagaaataaattagaatacctcctgctaatgtttttggaagctgctcccatcaagcatcagcaactctagtgaagcatggtcaacctggagatctgaaaaaaatctgacaggcatttgactaatgkttacctttttgktacttataaaccattgataaataatttaagactttataaatawtattacagkatttctgktaagawgggatatactacgctyyantagccataaatctcaatctcakggtymcctaacaaaggttattaacggccatgtcaagaaccatcttttttttttttttgaaaggg

SEQ ID NO: 89 - DNA, 215 bp, Homo sapiens
  misc_feature (191): n equals a,t,g, or c
  misc_feature (197): n equals a,t,g, or c
gaaattccagaacaraaagtcactaagagttgatcctaggacacacaaggaatgtatgtacaatggattgatccataagtaaagtgcagggttgtttcaagtattcgaagcaaatagaaggtgtaatttaaatcattccagtcaaaagattgccttaagtaaatacacaattcttatattaaagttagganaagganaaccaggctcaaactgca

SEQ ID NO: 90 - DNA, 526 bp, Homo sapiens
gtcaaaagtaggttgtggaagagtaggaagcattgcacctaaacttccatgattaactccatgtgttttactcaaagcatcaggttgctctttagacttcttggttgctttggaaattttgatggtgctttttggagagtggcttgggaagccaaaaaagagttgagggcaattactgctttaaccaaaacaatagaacagcaggaagttcagtgcagtcccctagcttctccccttctttactcatttaatactggagaagtctgtgaattatggtatacactgaatttccaacttcgtggacattggcccttttcattatcttaagctcttttcattgctccgtttctgggccttatgggaaatgattcaagcactccatggaagatgatcaattctcaagctaaccccaggcaagtatgaagaattctcccaaaatcacatgatagcaagctgataagatttctctcatcttcagtcagtgagaagaccaaactgcttcaacaagtttgcttcctcaaggatg

SEQ ID NO: 91 - DNA, 149 bp, Homo sapiens
  misc_feature (138): n equals a,t,g, or c
gcttctgttcggggaggcgctgccaggaataacccggtgcgtccacagcccgggaggggaggcggccgctgcggctcccgcacgcagacagctgcggcccgggcctcgcggctcccgcctgagcccggcggcccctgncccgggcccat

SEQ ID NO: 92 - DNA, 640 bp, Homo sapiens
  misc_feature (555): n equals a,t,g, or c
  misc_feature (634): n equals a,t,g, or c
  misc_feature (638): n equals a,t,g, or c
gtgaactcctttgaatacccctactaaagggaacaaaagctggagctccaccgcggtggcggccgctctagaactagtggatcccccgggctgcaggaattcggcacgagcagggctgtggaggtcttcaaggggctgtattcaccctacaagtattcctgtgcccaaaagagtatgacatttaatagcaaatggcctctgacttttaagaagccatgtggctacccctcagcagacttaggagaggtcttggctattatttgttgwtttataaggtgtcatcattgagcatctactctggatgaggctctgtgctgggcttgaggggtacagggaagtttcacatgtcccgtcttgttgaatcacacacacttgatctcactacaacaatctttagactatatgtgtcttgatggtagggcaatcaaattgatttcctcagcatatacgagtcatgttttgtaagcatggtgggtacttagtcaatgtctcaatcagatttgcttctgtttagcaagataatcttttgtgggggagtgttatggactgaactgntttccttctccaaacgtatatgatgaaacctacccccatgtactcagattaagaagtgggcctttgggagataattcanggtnaa

SEQ ID NO: 93 - DNA, 631 bp, Homo sapiens
  misc_feature (624): n equals a,t,g, or c
ccctcctaaagggaacaaaagctggagctccaccgcggtggcggccgctctagaactagtggatcccccgggctgcaggaattcggcacgagtaaagaagaagaaaggaatatcataataataattgaaaatgcttggggacaactacactggaagacataatcagacacacctgtttgtataatcactttgaattgggatgttacaaattattgcagttatattttcagaggattcaaatatcatatgtgccatggatattgatattataattttcaaaaatgattaacaattctcagtaaggttcaaatgaaacaaagtatagtcttcagttagtttacattggatttgcatttatgggaaattaggtgtctattaaaaccatgaaaagaaatatttaattttttatgtaagattgaatttggtcctaggcttaaatcattacatacagattttttaaaaatctacatgaatagttggtgggacagtaaaatctaacatgatatggaacttccccttaccttcctgctactacccactgaatgcagttaacagtcccataataatttatactttgagacaccctttccaagaaaaatgggcctcataaactttcaaaatatnccctaga

SEQ ID NO: 94 - DNA, 552 bp, Homo sapiens
  misc_feature (499): n equals a,t,g, or c
  misc_feature (507): n equals a,t,g, or c
  misc_feature (550): n equals a,t,g, or c
gaagacacagaaagtcaaagagagaaaggaagagagaaagagaagtggtaaagggataaatatctcaacctctcaccctctaatttcctcctgatggctgaacccaactctaacacagaaggagctaggacaatacagttcccaggggtcagcctcccagggaccagggtagggtagaggagtagatctcaagtttctcatctgttgtggactgaattgygtcccccagacaactcatatattgaaaccttaacccccaatgtgactgaatttggagatggggtctccaaggatagaattaaggttaaaggagatcataaggttgggggttgatccaatagaactggtgtccttatcagaagatgaagagaaaccagagatctctctctgtctctgccatgtgaagacacagtgagaagttggccttctataagacaggaaaagacctttcaccaggaaccaacctggctggcacctttgatcttggacttctagcttnccaactgngagaaaaataaatggatattggttaaatcacccagctggggtntt

SEQ ID NO: 95 - DNA, 645 bp, Homo sapiens
  misc_feature (452): n equals a,t,g, or c
  misc_feature (505): n equals a,t,g, or c
  misc_feature (507): n equals a,t,g, or c
  misc_feature (509): n equals a,t,g, or c
  misc_feature (551): n equals a,t,g, or c
  misc_feature (613): n equals a,t,g, or c
gggttcatcaaggataatctcagctgggacaaaacagctctgttccatgtggtgtctcatttaccagcagactagcttggacttgttctcataatgatgacaaggtccaagagagaatggaagtttgtgagatgcgagcctatactcagatgttgtaggatgtcacttatgctgaattctactgtctaaagcaagtcacaaaactggcctagacttaaagtgtgagctaattccacctcctgataggaagacttatacaggtgcattgcagagggtatagataaagggaagagtagggaagtgtggctggttttgtaatctaccatactgactgcagtatagtttggtaagtgtggtgaggaaggcaacatctagattctaaaaagcattaaacaaatttcaacttaagttaattcaatttcagcttagttttcctataacaggggatgctnctaaaggaaaaaagaaaaactgggttggttatcttatattaggatcctactgngngntttctaaaatcattaaggtatcaccagatgatgctgttttgnctacttaatacattactcagttcatcctgagcccattaaggaagttggttactaagggtcgnttatggcttaggaaagttgacccataatcttt

SEQ ID NO: 96 - DNA, 267 bp, Homo sapiens
  misc_feature (174): n equals a,t,g, or c
  misc_feature (186): n equals a,t,g, or c
gaggcaatcagcacataccttcatctagacagggtgacgggcgatcagcacacacctccatctccacagcagcaggaggaatcaacacacaccttcatctccacaggcggacgggggatcagcacacacctccatctccacaggggcacgggagcccgactccccactcccctnggggacacgtantgggcgtgtgttaaatcccacggaagcaagctctggtcactcagcattggtacagctctgtattatttgtcttggaaaatc

SEQ ID NO: 97 - DNA, 534 bp, Homo sapiens
  misc_feature (398): n equals a,t,g, or c
  misc_feature (494): n equals a,t,g, or c
  misc_feature (511): n equals a,t,g, or c
  misc_feature (530): n equals a,t,g, or c
ggcaaagtggagcacatgaaccagacactcaaacagccactgaagaaatattgccaagagacccatctaaggtgggatcaggtcctacccatggtcctcctccgagtcaggtgcacccttaccaaacaactgggtattcaccctatgaaatcttgktcagccagccacccccaatcataggtcaaattaagggtgatctccgggagctaagggacttaaccttaagaaagcaaatgcagggcttagggatagccatgcaagatgtctatggctgggtacgggaaagaatgcccataacctggcagacccagcacacccctttaaacccggggactctgtttgggtcaagaaattgaatccaaccactttgggacccctatgggatggccccatactgnaatcttgccactcattgagcaagaaaatggcattcctggcttgcaatgtggaaggaaggcttttcttcttcagtgcttgcatggcagactctctgntcttggcccctgaatgncaagctcatgcctcaatgnttaa

SEQ ID NO: 98 - DNA, 1014 bp, Homo sapiens
  misc_feature (658): n equals a,t,g, or c
  misc_feature (687): n equals a,t,g, or c
gctcgtgccgaattcggcacgagcctcagcctccctagtagctgggattacaggcatgtgccaccacgcctggctaatttttgtatttttagtagagatggggtttctccatgttggtcaggctggtctcaaactcccgacctcaggtgatctgcccgcctcagcctcccaaagygctgggattacaggcgtgagccaccgcgccgggctaaacagcatctttttaagcactgaatttggttttaccccaaggaagtattttgctcaggtcagtaagcattggactcaccttgttccactacgataatctgtgttcttattaacctggaggaggttaacatctcctaaataaggagctcagaaagaaaggktactttatgatgttcggattcttttctccgaggaggaatttgwtagcacttaagaaaatatgcatatgamattgtaatgatttgwtttgtcacttaagctccttactactgaaatggyaaactacaaattgcaaccatttaaatccttgacggaagcctttttagaatctattaagtaaatgccactttgtcgctatgttttcttttctgaacctttgcagattagggaggtaaacgattccaaagctgtaggatggcacaaaggataaactgaataaattactctnctttaattttcttaaacttaaaaatttgngtcatgtgggtagattacttaagggttaatgcctgaagacttagatttaaattacatttagaaagkttcactttcttttaagaagacagggaataagacctagaggtaagatctggatgccagagacttgggctgtgtctagatttgcaaaaggagaagaaaaactcagatagtcccccgtgttccttaaaccaaaacattttcatttctaattgagaatcatgaggcttagcaaggcctggggcctagaccatcgtgatcattattcgaggtccctttgattctgagggtgcagacccagccttgagagagagagagagagagaac

SEQ ID NO: 99 - DNA, 613 bp, Homo sapiens
  misc_feature (448): n equals a,t,g, or c
  misc_feature (562): n equals a,t,g, or c
  misc_feature (608): n equals a,t,g, or c
gatgacattcacaatgttgtgcaaccgattactaccatctattctttcccaatccctagtaacttctaatctactttctgtctctaccaatttacctcttctaggtatttaatgtaagtggaataataaaatatttgtatttttgtgtctgactactttcatttagtataatattttcggggttcatctgtgttgcagtatgtaccagaatttcattcctttttaatgctcagtaatactctattcaggtggacattttgcaccttttggctaaactggatactgcagtgaacattggcatacaattattggtttaagtccctatttgcaattcatctgggtatgttccttggaatggaattgctgggttggttttgtaattcgctgtggttagcttcttcaggaactgccatattggttttcacagaacctgcaataatttacattnctaccmacaatggacmccatgtcaatttctctamctccttggccacacttgctawtttctttcttttctatccaacttaaatgggggccctttgggttggaattctctaaccgnaatggtattaagcatcttttcatgggctaattggccattggaagcnttata

SEQ ID NO: 100 - DNA, 566 bp, Homo sapiens
  misc_feature (474): n equals a,t,g, or c
  misc_feature (525): n equals a,t,g, or c
  misc_feature (531): n equals a,t,g, or c
gatttcctgcatgaagaattggtatcttcaggatgctgtagcttttatcttgtataattgccttaaaatttgcatctctgccctcagaatgaatccagtttgactgggttggtaaaccaaagacaactgcagtgctcagggggatgggtttgggtgtacatgtgggagtggacgccttasagaartgttgaggttccaagcccttttcctctggcatgtaaatatctctgacttcccctccctctcccgctcctggtgatttgaggcaaaacccccagtccccarctctycargcagaargggctgggggcctgsctgkctyctttgggaaacttyctctctyctactaaaccctcaggccctttcctaagtagatatcaaatcawtgagttttccgttctagtttggtaactttgatttgcatgataccatttggatcaaagcactgaaagaaaaattaaccaagctcctagnattttcacggtcttaattactttttcctggtcattcaaacttaaaggcagntaaggngaaagagatgagagagatctgaaacagggatgagg

SEQ ID NO: 101 - DNA, 237 bp, Homo sapiens
  misc_feature (196): n equals a,t,g, or c
  misc_feature (213): n equals a,t,g, or c
gcagttctgarcctcaagttccatttcctctcacgagaggatgtgacgctctcattcagccactctgccctgtttgggagctttttcccacagtcaagccggtctattgcccatccttggatcatgtggtaggagctgatgwttttaccacccgctctgccatcttcttgtggttacagtgccctggttttcacangaaagcatgccttcctnacccttattttggatggccaaata

SEQ ID NO: 102 - DNA, 359 bp, Homo sapiens
  misc_feature (277): n equals a,t,g, or c
  misc_feature (322): n equals a,t,g, or c
  misc_feature (324): n equals a,t,g, or c
caggtctgctgctaccagctagtccaagccaccaccagctctgccatggagccttttaattggactccctgcttccattcttgtcctttctagagaaatctttaacaaaaagcaagtgaaaattacctctgaaaaaatgaccacttacaaaaggcacaattttcttactgagtatcagatcgttcataatggagaaaaggtgtatgagtgtaaggagtgtaggaagacctttattcgcgctcaacacttagtcaacaccttgagaattcatactggngagaaaccttataagtgtaaggaatgtggcaggcctttagacagngngcacatcttattcgacatcacaaactttacaccgg

SEQ ID NO: 103 - DNA, 404 bp, Homo sapiens
  misc_feature (237): n equals a,t,g, or c
  misc_feature (306): n equals a,t,g, or c
  misc_feature (339): n equals a,t,g, or c
  misc_feature (346): n equals a,t,g, or c
gatttaaagggtagaaaaatatcaacaataatcaacatcaaacaagaatcttggagatactagagcacagccaagttgtcagtaaatatgaaaatagatgatcagaatgatataattaaagttaaactcaacgaatcaatatggtttgacaggaagatgggttgacatacaaaacaattttgaattaatatatttctaatggtggatgtatttcttgaagctggggcacatttctangcattgaaaggattctttcatgaaaaacaatgttcatttcactttataatcctgaaatgataattttangatttactgtttttgctcatgttaatattttanaaattanaaaaattggcttatttatattaaaaaaattttagtatgttatttattattaatattta

SEQ ID NO: 104 - DNA, 541 bp, Homo sapiens
  misc_feature (518): n equals a,t,g, or c
gaaagcattaaggacaccaatccagaaaaagggtctcagcatctaggccttcttgtataactccaaacctgtcgcttttctcttcaaggtttaggagttagcagctgtattgataagtcctgatcataaacccatctgcatttgcacaaaatggtagagttagcctatcccttcctcccttgaatcatggtgctcacttctgttcgttactcataaatgtgctttgtggccatttcttttctgagtagggtactttaatctgcattaaaaatctattcaggcagatatcctttctcctarataattttcttcatggcatctaaaactcttctgktgkctcttggcagcaraagctgcttccctgktatcttgacatttttataacccaaacttttcttaaaattatcaaaccatccttgstgamattaccttctccaktttagatccttcaccttcctttgctctaagttgtacataataaggtgggctttttctcaaatccattagactctataggnatggctttcttataacaatcctg

SEQ ID NO: 105 - DNA, 672 bp, Homo sapiens
  misc_feature (500): n equals a,t,g, or c
  misc_feature (598): n equals a,t,g, or c
  misc_feature (610): n equals a,t,g, or c
  misc_feature (616): n equals a,t,g, or c
  misc_feature (671): n equals a,t,g, or c
gagggacaatgagactcaaacatacagaaggacaggggcatgcactgacaaaaacatcagaccctcctccaagagccacgtctccaatgacagcagcaacagaacgacctcagacaggctgtgggtggaggtgggaaacaggtccatcttaccttgcaaggggacagggcttgagtaaagaatagaagatggaaaattaactccgtacagaacacacgttggaaacgagcagcggagagaatgcctaaatccagaaaagtgcaaagaggccaggggacatcatcagacacagaactggaccttgctctgctggggatctgcattcactctgccagaacaattccaccactcarctwagggcccgktctcaatgtattctgggtgttagcagcaaatcttgggctctaatattctgaatgaaaatggtttcaaagctactcggcccacagtcaatctaccgaggctggctttttgataggaggwaaaggcattawtactgntctcatctttggcttagaacctagcataacttgaagacttgaagaatgaatagccacgaagcatatgggacacagttgaaaactctatgggtgctctnaactcttaatancccaangttctttctttctcagcagacccaaggtcacataccatcttgtgcggaataggang

SEQ ID NO: 106 - DNA, 406 bp, Homo sapiens
  misc_feature (279): n equals a,t,g, or c
  misc_feature (300): n equals a,t,g, or c
  misc_feature (323): n equals a,t,g, or c
ggttcttcaaagctgcacagcattcattgagagatatggcatcgtggatggaatctatcgcctttctggtgttgcctccaatatccagagactacgccatgaatttgactctgagcacgtccccgacctgacgaaagaacgtatgttcaggacatccattctgtgggttccctatgtaagctgtacttccgggaactcccaaaccctctgcttacctaccagctgtatgagaaattttctgatgcagtttcagcagcaacagattaataaaggctgatnaaaatccacgatgtcatccancagctccccccaccacactacanaacactggagttcctgatgagacacttgtctcttctagctcactattgttccccaaactgcttacttggaaaaaggccaggcc

SEQ ID NO: 107 - DNA, 561 bp, Homo sapiens
  misc_feature (351): n equals a,t,g, or c
gctcagattttcagcatgcctttctagctgtcattcctagccattgtttctacatgtccacagaccccatgcctccatcctgagccttttggacttatagagtttaggttaagcaatatactatgaataggcacatgggttacagagaacaagagaaaaggatattctcttaggaagagccaagagagaaatgggacacaacagcatgacacagcggtcaacacaggccttggatcagwtgactaaccttgaaaggttccctgtgaaataagaagctccaggttaataccacattgcccctttaggccaataatgaattctgatcaattccacttaagaatcgttcattgnttctttgtcactgctctaacctcatggcaaatgctgagatatgtcttgaggtgatttatcacaagggtttctgaatcatgatatatcacattcattgcatcttccttaccaggcacccatttccaaatattacatatttatctccatttttaacactacagattaggcaatggtgagtgccttttttaaaagtccctactaattaaccgg

SEQ ID NO: 108 - DNA, 567 bp, Homo sapiens
  misc_feature (308): n equals a,t,g, or c
  misc_feature (495): n equals a,t,g, or c
  misc_feature (505): n equals a,t,g, or c
  misc_feature (541): n equals a,t,g, or c
gattaatactagttcttgagctattgctgttactaataaaccattatacatttgcaatcagttacattgttttgtgggaatgaatttcatttatagaacaacatgcaaatgggtagcatgagttctaatagtaaatgtgccatyttatgtaaggaagawattggtatataatagtgtattaatccctaaaaggaaaccaaattaattacatagctgataaaaggaagtgcatacattgctataatcttcttcaatggcatattaaattttgccatatattttatattacacacatatttgtgtttgtngtgcaactagtttttgatggtctgttatttcatattccaaatctctgggtttcttccttctattgaaaatatagtaatatagttttttaccttcatgccattcaataggtttgttttaagaaattaacactgattttcatgcttaattacaagaaatattttaagaaaacaaatcgttcaataacanttgcaatatnagtcagaaattaattctattaaagtgagggaataanttcaaggaaggaacaattagtcttca

SEQ ID NO: 109 - DNA, 327 bp, Homo sapiens
  misc_feature (267): n equals a,t,g, or c
  misc_feature (291): n equals a,t,g, or c
  misc_feature (304): n equals a,t,g, or c
caatatgagaacgcactaatacaacgtcctgattttgtggttctgttcttgtttttgtttttaggagctaacattgagatgcatttttttgttgttgttcagtaacttcacaatctaagcatagggctttggaaactgctaaaacatgtcatttgcaaaataggatatagaaaaaatgattgagatgatttgggctaccaattaatacgtctttaaatcaaatttttttgtgtgcatcttacatccattctctctcgaagtcatccntgttgctgccctgaataacacatngcatttaaagtgnttaatttaaaatgaattttgttt

SEQ ID NO: 110 - DNA, 270 bp, Homo sapiens
  misc_feature (218): n equals a,t,g, or c
  misc_feature (243): n equals a,t,g, or c
ttttttttttctgagacggagtatgcttattctgtyacatttgctacmtaaggcttaacagagagttattacyayaaaataagaaayttgaagaaagttagttctgagaaaagatatyaataacatttatgatttaaaggggaagctttgaagaggaacttttgctttctacatttccttccctttttaatttttataatttttcctttttaaactgntttagcatgttttggcttaattgtnctacttggaccttttaaaaggggaaac

SEQ ID NO: 111 - DNA, 502 bp, Homo sapiens
  misc_feature (379): n equals a,t,g, or c
  misc_feature (382): n equals a,t,g, or c
  misc_feature (459): n equals a,t,g, or c
  misc_feature (487): n equals a,t,g, or c
  misc_feature (498): n equals a,t,g, or c
gaaaaagccagatgtttaaaaataggcagtttggccagaaacgttccaaagaatattctccatgtaatacaccaccatcactgaatgatgaccatggtgctagacgcttgcttatctctgtaatcctgttgaccgctttccactaaagaggagggagtagggtttagcagtcacagagctagtcaggaatcaggccaggtctcctaaaawctgcttcaaaatctgggataagtgtccatccagggatgaatggacaaagaacatgtggtatatgactgggtgtggtggctcctgcctttgtgggagctaggtagatggttagcactaagacactcaaagagtggggaacttggcttatgaacagttttagacaaatagntgnattatataaattaatcacatgtcagccatcaataaagaagtcccaggattcagaggcagtccctgctatgggaaganctcggcatctgagtcaccactgatatgngtggaccttangttt

SEQ ID NO: 112 - DNA, 474 bp, Homo sapiens
  misc_feature (406): n equals a,t,g, or c
  misc_feature (445): n equals a,t,g, or c
  misc_feature (458): n equals a,t,g, or c
  misc_feature (463): n equals a,t,g, or c
gagatgatttcttaaacaaaatacamgatacaaaaatcttaaacgagatacaaaaaaaaaaaagaaaagaaaaaattgataaatttcccagcaraaaaattaaaactgataataataagtaatgtaaacatatgaggcgatggaaggtcactgttgtttgaagtataaactggtatagcctttttggaaaataatcacaatatctcaaaaaattaaaaatgaagattgaaaatacctccaacattttcacttctatgcatataaactagaggaatttctcaaggagattgggtaagaatgtttgttgtgttatttgtaacagtggaaaaagtatactgtaaatctgttcaagactaggtaaatgtaatatccataaaatggataacagtgaaactatatgtattgntttctttttcaagccattaacatggattattttggttgnaggttaaatatgntctgnattataaccct

SEQ ID NO: 113 - DNA, 611 bp, Homo sapiens
gcttaggtggtcatagtcctcccgtgctgtgtcagctcctacatagcattagtctttcacgtgataaagtgcaagcacttttccattttacagtatttggggaaattctaacacactccccagggatttgtgcatgtccttctgcctccccggtgggtcattctgtggattccgcacctggcagtcggtcttcccccttggaagcccctaggatccctgtttctacgggcctggtccttggtttctaccccagtcccttttggccggcacctgcctggaactgcctggagcgccatggtatggggaaggacaggtggaaccctgaccacaacagatccttctaaaacaacagtcacattgatgatgatgagtgcagtggggtgaatgtcgtcacagcatgcatgctgggagctgccaagggcttacaacaaaagcagttcttcctaaggcaccctttgcatcttcccatccacgcctctcagtgcatttggaacttgcttatgcattggaataacttgagtcagctgctcgtttctgtgcctctgcactcacaggttccttcattaacattttaaataagtggttaaaaactcctctggaggttgtttttg

SEQ ID NO: 114 - DNA, 547 bp, Homo sapiens
  misc_feature (512): n equals a,t,g, or c
  misc_feature (522): n equals a,t,g, or c
  misc_feature (527): n equals a,t,g, or c
  misc_feature (545): n equals a,t,g, or c
  misc_feature (546): n equals a,t,g, or c
ggaaaatagttaccatgaatgaacaggggaaatggaaacgacaaaaagagctaagtagaaattctagagcttaaaaatactctgtcaggattcaaccagagaagtagaacctggaggatataaatatgtagagatttgtttattgattatgtaattcgggggccagctaagcaaatctaaaattcataggataggctgtcaggaagggaagattgcagggaggctggaactcaggggcacaggccaaagttgctctccgtaggtgaaatttgtcatttcacattttactgtaaacagcaagataaaactgggtcacatcttcatttttggaattttcctcaagtaaatatccaacttcatcgtttacaagttctgcttcacaaataactacagggcacaaattcactaagctctctgcaatacataataacaaggatctaccttactcaagtttacattaatggggtttttacttccttctgagccctcactacagcatcttttaagtccanatttctgtangcagntcataagccctgccacanng

SEQ ID NO: 115 - DNA, 303 bp, Homo sapiens
  misc_feature (271): n equals a,t,g, or c
gcattttccagccctgtgtgagctttgaggattgttttgcttccttctactggtggttcattttttctgaggcgggagtttattttctcacatgcttagatcagtagtcagccaaacccttagggaacccccacttgaggtggctggagctctctctctgttcagcttcctcctttctgacactctggcacatagattctaaatacctgatctccctgaactcagaggttgtctcaattaagtggaaacttcaggctcttggtttcttctncctggcatttgggctggaaaatggttacaggg

SEQ ID NO: 116 - DNA, 602 bp, Homo sapiens
  misc_feature (302): n equals a,t,g, or c
  misc_feature (516): n equals a,t,g, or c
  misc_feature (545): n equals a,t,g, or c
  misc_feature (550): n equals a,t,g, or c
  misc_feature (575): n equals a,t,g, or c
  misc_feature (580): n equals a,t,g, or c
gctcgtgccgatccaattgccttcttcatagatctactttgatttctaagtagcatctcagacttatccccaaagtgaactagatctctgtctgccaaacatttaccctccagtcttctccatcctagaaagttacactaccatttactcagttcacagaccaaaagtgtaagtgtcattttccctcacattccacatcggcacatcatcaagcaagttggttttatgtttgatgtataccctctatggggtcactaccctctaccgccattgctacccctatctcttgccaaggctgktgncataatagtctcctaatgctttatctaataatctgtctctacagctacctggtaatcttaaacaatatatatctaattggtttatctctaccactacccagatataaaacttaagtggatttctggtaaaattcaaaatccartcagtggtgaattggttaaaaaagtccacaatttgggctggacaaccagtcaaagggtgaataagaagatnggaaaaaatatgtcaggtaaatactttanttcantggaattaatgactttccctggaanaagcnttaataatttatttaatacccc

SEQ ID NO: 117 - DNA, 284 bp, Homo sapiens
  misc_feature (258): n equals a,t,g, or c
  misc_feature (267): n equals a,t,g, or c
gcatagatccaaatggtggttttaccatttactagtcatatgattttatgctgcccataattcaatatcatcaagctttgttttattcatgcaatatagataaaacagtatctatctcatttaaaccattgcaaaattaaatgggatattctagataaagctccttttatagtgcctgaaacataacatggacttaaataagaaagggtaattattcttgattatgataaaactatcaagattctggatgtattttanccaaggcanaagtaaaaagagaactg

SEQ ID NO: 118 - DNA, 511 bp, Homo sapiens
  misc_feature (288): n equals a,t,g, or c
  misc_feature (319): n equals a,t,g, or c
  misc_feature (446): n equals a,t,g, or c
  misc_feature (457): n equals a,t,g, or c
gaataggcacagtcctgaaagagcacagtcctgaaagagcacttctaattgggcatacaagcaagctcataataaagttctcctaggaagttttcctcatgtwttgaagatgatacacttagtccctgactggggatggtttccgcttacactttttcaactttacgatggtgtgaaagtgatacaccgttcagtaccgttcctcaattaacaatgaagctatgtcccgataaacccatcataagttgaaaatatcctaagtccataatgcacttctgatataatggnattttcaacttacagtgctttaccaagatgnggcgcattgtaagtcgaaggagcatccatccctgatgggatatataaggatgagaattatgcacagatggtcctcagcttatgatgggatcatgtccagtaaagacactgtaagttggaaacatctnaagccaaaatncatttgatatactaagctatcaagcatcatagcttaagcctcacctgcttattg

SEQ ID NO: 119 - DNA, 677 bp, Homo sapiens
  misc_feature (618): n equals a,t,g, or c
  misc_feature (648): n equals a,t,g, or c
  misc_feature (666): n equals a,t,g, or c
  misc_feature (673): n equals a,t,g, or c
  misc_feature (677): n equals a,t,g, or c
gccgcctagcatttttcattggaaaggtaatggsaaaacagtatgaaagaaccttaaaagctcatacttttgttcattcaacaaacatttcttctgttctgtattacgctttctgctagatatgaaatggatactgccatcatttctcaggtcttttcattctgatatatttctttttattctttatccatatgcaggcatagtctattcattctaaggcatagtggacatacggtttgctttgcctttctgtttggttatattgagaatgtttttctgggttactgtaaggtgtctcattatcatttataatggctatataatgaccctttgagtttcagtatctaaccaaaagttccaaaattggggtaatgattatttattttgaattcttaaaaaaacccagcattgtgttaggttggttacccgataacattgtacttgtcaaaaatgcttagggttctagtcatggccgaagtaaatcatttccacctattaagttgcagtgagttaattgcccagtagatgctggaggctggctttatctctaaggctgaccttgatgacttcttccccctctgagttggtgttccttttggcattcttcagaaaggtcgntttgtggtatatcttaacattatgtctcanaacacatcgccactaggnggcaggnctcn

SEQ ID NO: 120 - DNA, 551 bp, Homo sapiens
  misc_feature (337): n equals a,t,g, or c
  misc_feature (369): n equals a,t,g, or c
  misc_feature (422): n equals a,t,g, or c
  misc_feature (483): n equals a,t,g, or c
  misc_feature (538): n equals a,t,g, or c
gtttttaagatcagacataacttccaaatagaagaaaccatgtttaaaaaaaaatccatgctttttaatcattttcttatgtaaaaagcctcaagtggctggaataaggtctaagtaacaaataaagaactaaacttttcagataaaggctccgaaagtccctcttgttttcagctttcaaaattctttctctctctctatcaatatatggytcacgtgtaaaaatgtgcttacctgtgtagggatgaaattaagactgtctgtcatctactcctcacaaaaggaaggaagtgagattattgcctactttttccttatcttttctttttttctctgntggaggtataggatcaaccctcatccctttgntaaatataaatgaatcatttaaaagggtaattattggaaggaggtaacctgancattaacctaattgcaatacccagttgaagaaaatctgatatataatttaccagatggcanggttttttgggtttgggttggaattttgaagggtttttggtttttaaattttccntttaaggaccatt

SEQ ID NO: 121 - DNA, 623 bp, Homo sapiens
  misc_feature (448): n equals a,t,g, or c
  misc_feature (577): n equals a,t,g, or c
  misc_feature (592): n equals a,t,g, or c
  misc_feature (620): n equals a,t,g, or c
gctaaaatgttgaaaaatatggagacataaaaatctctacaattccataatttaaaatctgctgatcgttcagagttgataaagaccacagaaaacatagatgtgtcaatggacgtgaagccttcctggaccaccagagatgtggcacttacagtgcaccgggctttcaggatgattggtctcttttctcatggattcttggctggctgtgctgtgtggaatattgttgtgatatatgttctagcaggagatcagctatccaacctctcaaaccttctgcaacaatacaagaccctagcgtatccattccagagtcttctgtacttgcttttggctctgagtacaatttcagcttttgacaggattgactttgctaaatatcagtagcaatccgaaattttttggccctggatcctacagctttagcatctttcttggactttactgntcttatactatctctgagtcagcaaatgacaagtgacagaatccacctttacacaccttcttctggtaatggtagcctctgggaagcaggaattgaggaacagatyttcmagccatggawtgggggaanctcggggggttcttntggtggaataacttggtattttggctanagg

SEQ ID NO: 122 - DNA, 264 bp, Homo sapiens
gcaggcatcttgttaaatgttcatgtataaagattaatgaataggactctcctgttctgcaaaaagctcacagtataactcctgttgcaggttgcagcttttctgcttgagctacatttcatttggtcctctatatttatcttataaaatagagaccccagttaggtgctaactagttgtacagtcctgtccagttttgcataccatatattttagggggacactactctttaactttgctattgatcttgaaagatgaattga

SEQ ID NO: 123 - DNA, 634 bp, Homo sapiens
  misc_feature (60): n equals a,t,g, or c
  misc_feature (467): n equals a,t,g, or c
  misc_feature (566): n equals a,t,g, or c
  misc_feature (584): n equals a,t,g, or c
  misc_feature (614): n equals a,t,g, or c
  misc_feature (623): n equals a,t,g, or c
agctttctttatgaattctgatgtgtatatagggagtttcctcttggagacgggcccctnaaaagcattctggagacaagaagagtcttaacccttctctcctgtgtcttccccgtcaggtggccaaaaggtatcaggaagaatgaatcattatcttcagaacaatagcctatgtagaaaaagagaagagggagtttggtgggggatttcatcctatgcaatggwttctaagatacaaaccaagtttttggaaacttgacgggggcaagtaggaaacacatttttctaaacctttcctggagtagtttctgctgttccaaaccatggaggtagtccatgtaggtgatagggcttggcctacactaaaagggtagtgtcaacctctgcatcttttcttccgttccttagacctgttaattaacttctgacctggaattaccaccgggtgtaaaggcacctattctggnggtgattctttcttgcattcagtaacatcagcaagcctgtctctatcataggtggaagtaactgtgattggaccctccgtgaatatgcacagagtctgnaacttttgagtcctacanctgggtgggcaaatctcttctacattatanaagctaagngaaaaagactt

SEQ ID NO: 124 - DNA, 444 bp, Homo sapiens
  misc_feature (427): n equals a,t,g, or c
gtatggtaccccctttttgtagataaaaaattttgaagtttagagaggctaaagttgtgtgtgcaaatgcactccctgccactcagggtagaactactctgcctttatttagtatttagacagaaatgcacttcgatttgctataatcacaagaggttttttgtttgtttgtttgttttaaaaaagaamaagatctggtccaagatagcagtaactataacgkcatgatgacctctgggtataactcctcaagtgtagaccctgatccacaaggctcccctggggtcaggaagttcaagtgatgcatgcgctggcttgaagggcccaaggagggaaggaggatgaatttgggccatgtaaggcataggatcaaagacttgaggtatgatagataaagcaaggatttgaaggcatcttggcaagctgnttgtgaaattagaaatg

SEQ ID NO: 125 - DNA, 539 bp, Homo sapiens
ggtcccagtcccactcgcagaaaaattatattccacaaagaagaggaagaagtgagaagattcgccagattttagccttatatgtaattccttcacatttgggcagcatggacgagaaggaagaatttgcaagtttggcctttatataagcatgtgttgcaggtgctgtttgatttttctaaggtatttttagcccttgatcccctttgcttgcgagaggtggggaactgctcactgacagcttctctgtaacctgcagtaccagtggatcrttcttgattttgttttcattagtgtcatttctttgtcattgaggacttttccccttacaacagtaacaccattttttgaagagcaaaacttataatacctcctgggattgtgagctagtcattcagcctgtgtaaccatgtggaaataaaaattgacgaccaatgtattatatggacaactttgctttgagtaataaacttgattgtaggaaaaaaaaaaaaaaaaaggggsgccsttttaragatccaagtttacgmcccgggcat

SEQ ID NO: 126 - DNA, 303 bp, Homo sapiens
  misc_feature (297): n equals a,t,g, or c
gcttttgcaccaacctaatacatagtttcaaggtatcttcccacaagtatttattaattataaaggaaaatagagtaactttacatggaagaagtgacagatacagctatttttctgagagatcaaattaaatattaccagtgttcatatacactgaaattctacatcatggttagcatgcaatgagaagaacatagcagcatttttgttatattattgccaaaccattagagtcagagtctaaccattagaaaatctaaaaaaaaaaaaaggaaaaaaaaaaaaaagggggggccnttttaa

SEQ ID NO: 127 - DNA, 257 bp, Homo sapiens
tacagtgtagtgtaagcttaagaaggtgtggagaggatgggagtsactcactgggcaggaatggcccagctccagcaccttgctatgaccagccagctgctgggaacaggccaggaagagtgtggccttagcgcaaacactggggtggatctcgagatgaaggtgtggccgctggaagctgtcacttcaccactcctcttctgaagaaagagctgagccctgcacatgggagcattggtgaaaagggtggtagacgt

SEQ ID NO: 128 - DNA, 318 bp, Homo sapiens
  misc_feature (40): n equals a,t,g, or c
  misc_feature (292): n equals a,t,g, or c
  misc_feature (294): n equals a,t,g, or c
tgtatccgttttttaaattttttaacaaaagaggcatatngcaaaagcatcactcactactttagtcagattcagagaaccctcttagaccacacttgagttattgtcatggaatagctttttaaaatggctggaaatgaagatagtctcttgaaagaacaccttttcctacctatttcagtattgtagtcaaatcttgaaatacaaattttttttttcaatggcatggtctcggctcactgcaacctccgcctcccggcttcaagtgattctcctgcctcagcctcccagnanctgggatcacgtggcgcccgccag

SEQ ID NO: 129 - DNA, 629 bp, Homo sapiens
ggacaaaatgtctgggactgtacaccaaatcccacagggtgacagacaaatgagaccccccaaacccaagaggaggaagatctcagataacagagactactccactaatgcgcagtgtttattaaaggaacatgcacagatgkatctgkatataggtattgatatagccacagttatatcaatatttagactatggcagatagctaccaccaccacagggtgctaaaagaaacagtgatacaaaatttttttgatcaggaaggataatgaatgctggaaaagccaatcaaagtctctgtgtgatgagagtgatcaatggtcaagagattactgagaaactctttttctataatactaaattgtgattataagaaatagtccaaatgtttctgaagaattttcaatgttgtatatagaaaatacagaatttcatggtgatatcagaaatgtaaatattgtacagtattgtcatgtacaagcgtacctaatgcacactttatcttttattgtacaaagaaatagtgtacaaaattctttggtttctatggagtacacctaccagagactaccagtgtaaagtgataaataaaaatacaacctaaatgcttytctatgawaaaaaaaaaaaa

SEQ ID NO: 130 - DNA, 1118 bp, Homo sapiens
  misc_feature (23): n equals a,t,g, or c
gcatcttttgggcatatcatagnaacaatcatgatgatgatgataaacacttgtatagtctttaagtgtgccagacacattgtaagtatttcacatatattaactcataactctcattactgcacttgagaaagctagtattattattattatcatctctaagaagtggagtcacagacagcttaggtaacttctccaagatcacacagcaataaggtggaagggcctgttgggcttcggagtctgagtttttgtcactatgcatactgggccccgtgttctcaaactcaacacatctgaaacgaaagtatcccgctgttcctccatgactccctgtctcgcgcaaccaacccacttgcccaagctggaaatctgtgagtcaccctggaattctctccttcccacctccattcaaagtaagttaatcacccaaatcctatyattctacctcctacatatttaaaacatccgtttaatggcctctttatctcctccagtctattctccacattgcaaccagagggttcctctaaaaagaacttaatcttgcctccttttgactgaccaactagccttcaatgggctagcactatctgtcggttaaatccagactccttaacacagcaaacaagggcctccgtaatccggcccattcccacctttgcagcctcatcactcctcactgcctcgtacccgctcccctctatcttggctggctctcagtttttcaaatgcactgggcactttctctctcatgggactttctgctctttcctctgcccagaatcctccctccactccctagatcagagttgggaccttctctgaccaaagactgtgataggaccctctgctgtatgttccttgtctccttttaactttccataataaaaaattcatcacacctcagtgcaattttttatctaaagtctmtgttcccaatagcatgaggatggggacaatgtctatcttcttcaamtmtgtatcccagtgcttagcacagagccacatatatagtggactatcaagaaatatctgtagaatgaatgaatggatgaataaatgaatgaatgtcagagctacttggagggatggcatactggccatcatagcaaagc

SEQ ID NO: 131 - DNA, 512 bp, Homo sapiens
  misc_feature (489): n equals a,t,g, or c
  misc_feature (501): n equals a,t,g, or c
  misc_feature (507): n equals a,t,g, or c
  misc_feature (509): n equals a,t,g, or c
gctagattcaaagattttctgattggcaattggttgaaaagttactgactaaagacttaggaatgtctttagagaataaaggggttgtggagaccaaggttttagtgagaatgggataattggtgtggaaaacacaatttggtgtcagaagtgttgtgaatacatagttttccaattgagtttctggatgagattaacatttcaattggtagactgagtatagtacattgtcttccccaatgtgggtgggcctcagccaatcgaccgaagacagaatagawcaaaaaggctgacctcccaggagtaagagggagctcctacagccaaacagcttgagctggaacacttttccagccttgggctcagactgggactgcacatcagtttgcttgcatctccagcttgtcaactgcagatcctgagacttctcagccttcataattgtacgggcaaattccttataataaatcttttatacacacaaaaaanaaaaaaaaaaanaggggngnccg

SEQ ID NO: 132 - DNA, 361 bp, Homo sapiens
ttcgtcgaggtgagccagctctatgactgcaactggatcgtggtcaactgctccacaccggccaactacttccacgtgctgcgccggcaratcctgctgcccttccgcaagccgctgattatcttcacacctaaatctctgctgaggcacccagaggccaagtccagctttgaccaaatggtatccgggaccagcttccagcgggtgattcctgaagatggggccgcagcacgggccctgagcaggtgcagcggctcatcttctgcacgggaaaggtgtactatgacctggtgaaggagcggaaggccagggacctgggaggagaaagtggccatcacgcgcctgggagcagatcttttcc

SEQ ID NO: 133 - DNA, 222 bp, Homo sapiens
  misc_feature (213): n equals a,t,g, or c
gcaattgttgattataagtcaaaaaaacaccatcatgtacaaattcaggggattttgtataccttgtttttttggttacaaatatgcaaaattaaagatgtttgctaatacttgtttccaatttttaaacttttcaagtgttgcactgttaataatgttaaaataaaaggcatttgacttagwaaaaaaaaaaaaaaaaaaaaaaaaaaaaanggggggccc

SEQ ID NO: 134 - DNA, 842 bp, Homo sapiens
gggaaactgaggcctagagaagctcaacaagttgcctaagttccaagtttcctctcccaactctcctaccctctcctcttccttctcctttctcccattcttccctgcctcttccctaactagacaattttttattgagtgtctcccaggtgcaggcatgagccaggtgctgggaaaatcatgataacccagctccttctggtcattttctcagctggttagaggctgggaggacacgcaagttcagctccagccgactggggcattggtggtagcccctggagacattgtgcaatggggctacgaggctgcatctggctccagggaagcgtgttgcaatccatgagtgatgtctgccatgcgtacaggcatggagagtgaggcgcctgtactgtctttctgtagaccctagactggtggggcctctgaaatgcatccagacactgtgctgggtgtgttgcatggccctcccaaccaattcagtatttttctccccattttccagggagaaatctaaggcgtcagaatgtaaggttcttattggaacccaggctccagggtccctggttttctgtgacatcatgctgcaggaccctgtttctctctttgctttggctgctggggagctcagaagggagctttaggcttgctctcagtcaccacattagctcaggggtttgggcatttttgtcgccgtctcctttgggctctgtctcctccctgctgtgcttcctgaggagcaggccggatgtaagttatcaactataaataaaaccaagacttccgttctggctctcaaaaaaaaaaaaaaaaaaaaaaaaaaaaaaaagtcgtatcgatgt

SEQ ID NO: 135 - DNA, 574 bp, Homo sapiens
  misc_feature (42): n equals a,t,g, or c
  misc_feature (43): n equals a,t,g, or c
  misc_feature (52): n equals a,t,g, or c
ccaggtaccggtccggaattcccgggtcgacccacgcgtttnngctcatgcnaccatccctgggtcatttttaaattttttgtagagagggtctgactcttgcctatgctggcttcaaactcctgggctcaagcaatcctccttccttggcctctcctgaagtgctgggatacagttatgagccaccacacctgccaagtgctttgtgatactatgcatttgttcaatgcagattgggaaacttaaaatttgaatggagattatgttgatgggctttggcagttcatttggatagactgggatgagaagctcttgggacttgtgactggacaaagcattccagtatattaaaataaaattaagccatattactccactcataaaaagcaatcctatggtaggtacatggaggttgggaatagtgcacggaaaggtggcagctttctttggcttcatgttttaatctggtaaagttcaagattgcactttaagcaggcctcctaaatattttagatttcttggggatatgctaaaataaaacaactaaggcmtcaaaaaaaaaaaaaaaaaaaaa

SEQ ID NO: 136 - DNA, 446 bp, Homo sapiens
  misc_feature (443): n equals a,t,g, or c
  misc_feature (444): n equals a,t,g, or c
gattcagaagaacttcaggcatgagttagttgcatataaagtacaatgtgaattcatgaaayygaagyygtgccacaagcatggaagaacccacatgcgtatccctggcctcctgtgctgaggaaaatatggctccttaatttttgctacgacgtttatcctgcagagaggatcaagctgattatgttagagcatttctgggcagagaatttagtgaaagtttgacagcagtggttcaggacatacttacaaatattttgggcagatgactatctgttagcttttacatccccagagccttccttaaattatggtttaagtaatagttcatggtttaattgtgatataatcttagtaggagtaataatatatctgttagggtataatgatgttatggtaatattaagaataaatgttcagaaaccaaccaraaaaaagacaannga

SEQ ID NO: 137 - DNA, 1165 bp, Homo sapiens
  misc_feature (837): n equals a,t,g, or c
ttcgttttctttatgcaggagagtttaagagaaatcagcacagatatttcaaaaaagtccatgtctttttatctttaaaatatctatttatcaaaggccagacacagaggctcacgcctgtaatcccagcactttgggaggcgggcagatcacaaggtcaggagtttgagaccggcctggccaacatggtgaaaccccgkctctactaaaaatacaaaaatttgctgggcatggtggmgcgtgcctgtaatcccagctactaggggggctgaggcaggaggatcgcttgaacctgagaggcagaggttgcagtgagccaagatcatgccactttactccagtctgagcaacagaacgagacttagtcaaaataaataaataaataaataaataaataaaatatctttttatctttaaagtgtttaacattggtatactgtctgtagttggttcattagtcgtttataaagggttattttctcatgagtggaaacctgaacaatcagttacctttgtgcctatgccttctctctcctcagacagctgggatgkttatggtgaaatggcctgtacaagkttaactaagacaacttaacttggattggtaatcaaaaattcttttctcaaagggttaactggttgccattttgaatagtatgktcaagggtgtagcttcctggttctttccaaattataagtagctacctaaatatagtataattatatattaataatatggcttgctggcacagtagtttaccctgttatctgtgtttcataatgggggctgtatgaatattatttaaaactaataaaatgttgccagaattatactanactgttggatgagattaggagatcagaggctggaccttctcttgataatgcttgttttgttaaaggtataatgaaataatttgtatatgatttgatgaagattaaagacccttattttccacagctttaaaaaaaaacctttatttatgatcaagtaataaagataatattctacttgtgggatcttacattayggaaatagtttgacgtttttgacctcaagagtatgtataatttgaagagatactttgtaactatgcttgggtgatattgagcagttcctaaagaataattcatttaaaaaaaaaaaaaaaaaaagggcggccgc

SEQ ID NO: 138 - DNA, 632 bp, Homo sapiens
  misc_feature (448): n equals a,t,g, or c
  misc_feature (465): n equals a,t,g, or c
  misc_feature (477): n equals a,t,g, or c
  misc_feature (575): n equals a,t,g, or c
  misc_feature (599): n equals a,t,g, or c
  misc_feature (622): n equals a,t,g, or c
  misc_feature (631): n equals a,t,g, or c
gatgagtyacagtcacawacatataattacaagccagtgtaagtatatgaaaatagggttttgtgatcttgtcaacaagagaacctgacctatttggggacagtttgagttgagatctgaaagacaagtgggagttaaatagacaaaacctgggggttgtgtgtagaggaaggtattctaggcagaagggaatagaaaggctgtgagaggggaaagtttagtgctttagaaacattaaaaaggccaacatgaccaggatgtacaaagcaaatgcatgtatagagttggagaggtagccagactatgcaggtttttgtgaattataccaatgatgttggtctttatactaagatcaatagaasccgttaaaggggtttgagcagcagaatgatgtggtcagagttttataagatcacactttctgtaatggagaactgacagttggaangcaaatgtggatatgangtggaatggacnaatgaagaattaactcattatctcttatcctagttggctgacaccacaagacttccagctcatctcttatcctcctcaatctaaatactcttaaactncttggatccttctccacctcttcnttactctggcactcttctacagnatccacagng

SEQ ID NO: 139 - DNA, 63 bp, Homo sapiens
aagttgggtcattaagtcgttataaaggggtattttctcatgaatggaaacctgracaatcag

SEQ ID NO: 140 - DNA, 917 bp, Homo sapiens
tggtacgcccgcaggtaccggtccggaattcccgggtcgacccacgcgttcggcgaggtcgggttccgggcgcttggagaagatggtgctgcggcggctgctggccgccctgctgcacagcccgcagctggtggaacgtctgtcagagtcgcggcctatccgacgtgcggcgcagctcacggccttcgcactgctgcaggcccagctgcggggccaggacgcggcccgccgcctgcaggacctcgcggctgggcccgtgggctccctgtgccgccgcgctgagcgatttagagacgccttcacccaggagctacgccgcggcctccgaggccgctcggggccaccaccaggtagccagaggggccctggcgcaaacatttaatcctgggctgtgcggggccgaggccgcttgcttttccttccgggctctacagtggcatcaatgtggaggggtcattccgggcactgcgcgcggcttcgaatcccgactgggattgttggcctgcagacatcccacgcataagagcctaggccagaccgcccgctccgttgaagtcttgtgattggacaagacacagtgtggagaaagacccctaagcctaacagagatgaaggtaggctgggtccagacacggcacctacggagagccacggaccgaagccagagagcctttcctctgcaagtgggactgaaactcttgacagatgctgctcaatctgactggtatagcaggacagttaattccagggacgatatggatgaaaagacaaccctacagctgccaaattcctttgattaaatgtgtgagctggttgataggcatgagtgtgatacttctcaggcaagatgtgttaagaataccggggactgtaggcctatggtaataataaacacgtattttatgaaatgaaaaaaa

SEQ ID NO: 141 - DNA, 273 bp, Homo sapiens
  misc_feature (234): n equals a,t,g, or c
ctagtgcagctcggtgatcaggaggtcaaagagaaccaagcagtttgttgtgattgtttttttaaaaactcttgacaaaactgatctaattcttcactcctgytcaaggctggctgtggtggatactggatttggccactggattttcctaatttgcccccttactctcctctattttctctcttaactcctcaacctgaccagtttgggctttttctttctcttttaaccatnattatcttraaccaaaaaaaaaaagggsgccgtctaaga

SEQ ID NO: 142 - DNA, 389 bp, Homo sapiens
  misc_feature (80): n equals a,t,g, or c
  misc_feature (215): n equals a,t,g, or c
  misc_feature (358): n equals a,t,g, or c
tggaaacctttgggctcgatttatgtgcttggttgggcggacggcatcgtcgtacttgggcgctcggaggtcgcggttgncccgcccctccggtcaaaactgggggagcgaggtgggttggtgtggtgtgatattgggtcttggaattatcgtatgatggggtcggatcgattcgaaaaaaacgctcggaccctcagagggtccgagacgtctanaacgtaccgatcggggggaaaagtgtaacatcaccgtccttaccgtcgtcggcgcatcaccccccataggtcggcggaccactacagacgtagtcgccacccactttattacgaaagaccctaattatctacattacgttcgnggcggcacagtattacagttccctcaacgga

SEQ ID NO: 143 - DNA, 555 bp, Homo sapiens
gatggtagtgatgttcaccatgataatgctgctggtttattgtggaagatctcagcagaagtcactgtacgtcattttgttatctctctcctttttttaaaaaaaatgtctgtacccatccatccactaactgtatgtcatttattgaaagtgtattccatatgcataaattgagttcacatatgtaatcagatagaattcagaaacagggatttcagaaacctaggtcctaggttgtgcaattgctactattcaagtatccttttctggatctcaattcaaataacccaactctaaaggatacatttatgggacagttggaggagtttaagcagaatatttggtataaaattgctacaaaattattagcgtttcaggtatgatatagtattgtagttatatgtaaaatttttcttaacttttgggatagttactggaagatttctatatcaagtgatgtctgtgatttgcttcaaaataatcctttgtgggggtgagggagcaagttgaaatagggtaggctgagcatctcaaaactgaaaatcgaaaatctga

SEQ ID NO: 144 - DNA, 1455 bp, Homo sapiens
  misc_feature (1127): n equals a,t,g, or c
ttttttttttttttttttttttatagtcaatgaaaakagtwtattmttttattgktttttgttyatacatgttaagtttcaactttcaataataaaattcaataaatttgattccttaatcataaaaactkgctttacacattakttacatrttgtcaaagtccatacaaaacatcacaaggatttgattgactctatgcatggtaccatcacacaaaggaggagggagctaatccagtaacawacattcaaagattaaattgyagatatgcacagtgtatttggcactgttsattaatattataacaccttcctctcaaagacaggcattcttaagcgttagtcacratataccagaatttgctattcayattaaaaccaccttttaaactttataacagtaaccrattattatagttttaagaaacaaaacrcaatgagaactgggaatggaattcaaatcctccaacttcttgctatgctccaagctgccatccataaaacaggtttaatttggtaatttttccattgtgggragtgtcaacaagaaacaatttaaagacartattttccaatacaaataaagacayayacttttgtttaaaatgamcagttcttcttgggagtgcaaagggagccttgatgaygtacarcttgtgatgattttggcagcaattacagaacaaccaaggccattcaagttgtggagattatactagcaggtgaactsgtaaagagaagattctggaatgcctatatctgaaatcagaatcctagtagtttgtagtttgcctcttcctagaagttcaagagactcaagtcataggctacagatgtactttcaagtatataattatgaatggaaggagaaaataaaagcacaaaaatgcaaatattaaacctttagtgacttggactatattccagtaggkaatttattccactaacttcactttaacaaagattaaatccctttattttaatcaggtccattaaatttcattcattaaagttatacatactccagaatgtttataagacatttacaccgatcatgtttacaaaaagcataaattcagtcttaagctgcactacaaatgccttaatataacataatcacagtatanggaaacaaatcagaaattctctgattagatatgctgtagcttcacagaaaactctcagtaataaattaaaacaaaaagacttacaatgtataatgggctatgcagtgcaaaatgatgtcaccggaccaaaatttagttcaatcatttttatttcaagtgtgttttaaaaatcataaacggggtttcataatccaaagctgaaacatttattcttcatagcttcagaattgacaagcaattgtagaccatgctttccaaatccagtcttctttgctatttttcaaatttctgagatctagtattaaactgctccattctaaatgtacag

SEQ ID NO: 145 - DNA, 242 bp, Homo sapiens
  misc_feature (9): n equals a,t,g, or c
ggaaagatnttaaatcagtaaggaaacttgacagacaccaccttaatcaagtgatcaaggyyaacattatcagyaataagacatctcaacactatgtaactccctgatatgacgcactgagaaggttataccatcacttctgtggtattcttgccagaaatgcataacttcaatctaatcataactaaaccagggattaactcaaattgagagacattctacaaaacaactgacctgtactc

SEQ ID NO: 146 - DNA, 673 bp, Homo sapiens
  misc_feature (518): n equals a,t,g, or c
  misc_feature (561): n equals a,t,g, or c
  misc_feature (625): n equals a,t,g, or c
  misc_feature (627): n equals a,t,g, or c
  misc_feature (646): n equals a,t,g, or c
  misc_feature (659): n equals a,t,g, or c
ggacggtacaagagagaatgaaaaatgggggcaaaaaaaccagaaaattttctctactatctctgacccataaggaccctcttttccactctgtggaccaaattagaggactcctcttggagtactttctttctgcacccattgtgcggttccagatttcagactgcctttgagtccaggacaggagatactggaggagggataacagaaagcttgccaccagttcggcagtacttcaagttctggtttccttccctagtctgtcatgaccatacactttccagagtccttagataactgctctgtgcattctttccagagtttttagctgcattcagtgggagagagaggatgaagtacacttactttactgtgacactctgtttaatagctaatatctgctttttcttctcttaggcttccttttcctttctattattatttgagttagatttttaatctggcctatcatcaaagcttgtggaaccaaatggaatgattccataatttggtggggntggtactatggtaacactacactggcatattgctgccaacagngcttttaattttaaatgcattcataaggggtaatttgacataagtttctctaagggaaaccagnanaccaccaatggaaaattangaaccttaccttnttaaactggcaaaa

SEQ ID NO: 147 - DNA, 300 bp, Homo sapiens
ccactgaccctgcttgtcatttcgtcagccagaaaaggaaaaaaccaagcaatacaatttggggaaaacatggtgccaaatccagtgccatttgaggtaacaaactcctcacaacccaagttgtgatgtgggactaattagattatttgctctcaagtcttgggtagtttcttttttgctatgtctcgtgaatttttcctcttttctgtaattgacctattattaccctaaaccaaacttttttttttttttagatggactccagtctgggcgacacgtgcaatccgtctcaacaaaaaa

SEQ ID NO: 148 - DNA, 622 bp, Homo sapiens
  misc_feature (5): n equals a,t,g, or c
  misc_feature (23): n equals a,t,g, or c
aacgngaaaacctgactctactnctagggaacgctgccacgcctgcaggtaccggtccggaattcccgggtcgacccacgcgtccgggcgcgacaagatggcggataaggagaagaagaaaaaggagagcatcttggacttgtccaagtacatcgacaagacgatccgggtaaagttccagggaggccgcgaagccagtggaatcctgaagggcttcgacccactcctcaaccttgtgctggacggcaccattgagtacatgcgagaccctgacgaccagtacaagctcacggaggacacccggcagctgggcctcgtggtgtgccggggcacgtccgtggtgctaatctgcccgcaggacggcatggaggccatccccaaccccttcatccagcagcaggacgcctagcctggccgggggcgcggggggtgcagggcaggcccgagcagctcggtttcccgcggacttggctgctgctcccaccgcagtaccgcctcctggaacggaagcattttcctttttgtataggttgaatttttgttttcttaataaaattgcaaacctcaaaaaaaaaaaaaaaaaaaaaaaaaaaaaaaaaaaaaaaaaaaaaaaaaaaaaaaa

SEQ ID NO: 149 - DNA, 480 bp, Homo sapiens
cttcggtccatctaggttttcagtggcccctgctgagacctcacactgagccaactactgtcactgttttaaccaacaaaagctagcctggaactgctatggttaaagtgggtgagcgggaacctgaaaatccccttctggaaggttctacagaactctatttgcaagctcctgctttaacctgagcgtcctctgctcaggatcataccccagcctgcactgagtcaagaaggagaaggaggctctgaaggggccgggggtgtgagctggggttgggactcccctgagaaagagctgtgggtaggaagggagtgagcattgcagagatagggctgggggtcggggccacactgagtgtgggaagctctggagttgctgctgggccatcgaggggccctggtgttggctctgagaatgttctgggtgaccagtcacctactttctgatcaataaaaatgtcgacatgcatttcttacaaaa

SEQ ID NO: 150 - DNA, 643 bp, Homo sapiens
  misc_feature (637): n equals a,t,g, or c
  misc_feature (642): n equals a,t,g, or c
gaaaacagttcctttctgatggggagcgtctgagtgcagatcatgaggctctttctctaggtttaattcttttccatggtgaccggacttggtgtcttgtagcctggttacgaagtgggacgttgagcttctactgacgatgccctgcatggaccagctgggatctggctggggctgccctgtgtccctaacgaccataggcaatccatcttcttgtgtcagcaatttctggacacccactgttttccaccaagagctgaggtggcaacaactcagtgagcaataaacaaaatgacacagaaatgcacagtgttgttatgaaggagcctgtttacctgtgttcaaaatctggcaccattcccttgagcagggcccgctcaggagggaccaggtctgccagtttctgtgcctgcagagagacgaagccccacgagccacaccctactctacaagaggaaagggggttggatgggaagaatctattttgctgttttggaaagcacacagccgacctacaaacctcctgtgatggtgtttcttcggatgtgtaaaataaggctttatttgtcaattccgctgtaaaataagcattgtccgagtaaaaacagcagcawcatcggggggggggggggggggngaaanc

SEQ ID NO: 151 - DNA, 492 bp, Homo sapiens
ttgatcaaaagtatttactaagtgagtgacaaaaggcactagcaactttaaggattttgcctattagtatcatatggcatgtagctatcaagccagkttcgkttagktattttgtgttgccaagcatatgatacgtggtgtcacactgagcctttgggatcctttccctggatacataaccctagtagataatgttactgcaagatgtaatgaccaaatccaacctactgcaaatgttactatggaaatctcaatgcaaaagtagcctttgtgattttttttttaaaccrtctccataacagaacacttagaattattagccatttgctgcaaagtatttgttttaaaatgtctggcatatacaccactaacatttaaatgcccaacattcggtctatatgtgaaaaaactagaagaaaagccctgttggagttttgatgtagagtgcaataatacatcaataaaggtattttaaaatgaaaaaaaaaaaaa

SEQ ID NO: 152 - DNA, 468 bp, Homo sapiens
gacacggttcaagacagttactcagaaggactggaaatagaagaatagctgaaaagctgtcttttgtgggggagatttgcatctgtggagagaatctacactgatgcggccaggcctcctctgaggccctccttgcctgatctgggaagagtaacagtctgacgcctttaaaggcctgaagggaacattcaccatctgttctctctcagggctgctacctgtgaggtttcatctgtagaacaaggccacctttgctagccaggcctcctctgctctcccycctgtaaccggtcttgccactgtcacctgattttccaccataaactgtggccatactttgagcccatgttctttctgtaacctcaagatggtgtataagcttccgaaccccattgggaggttggggtcatcactctggttctccctgtgtgcatgaataaatctgtatgcctttaaaaaaaaaaaaaa

SEQ ID NO: 153 - DNA, 307 bp, Homo sapiens
tttagactataaaacagcttttaggctgtagtgctctgtagtataaataaggcagtgaggcagcaactccaaagaaaattccctttcaagacttacattgtaacctacttgagtttatagttgtggagttttaattcatttgcattctaggccatgaccaagtgaccagaggactaaaatagtataaaagcatcctgtattgagtttccatagccaagggggtgtaagatcatgaaatttggagctgtttctcgwttttaaaaaatgagttgtaaaatacatattaaataaaatttaccaacttaaa

SEQ ID NO: 154 - DNA, 360 bp, Homo sapiens
cagccatgcattgggggattggttcccaggatgccccgctatacccaaaatctgcacgtactcgagtcccacagtcggaccctgcagaatccacagacaggaaaatttggctgttaggtttcgcatcccatgaatactgtattttcaatctatggttggaaaaaatccacgtgtaagtggaactgcacagtccaaacccatgctgttcaagggttaactgtagattgtcgtatactaatttgtatttccttgatttctaaagagttggagtctttttcatatttattgyctgtttatatgtcttcttttatgaattactcctttgggtgttttacaattatttaacggtatgtatatctt

SEQ ID NO: 155 - DNA, 450 bp, Homo sapiens
tttttttttttttttttttttttttttttttaaatagaactgtcttatagatttattaatgaaaaatactttacaaaaacagtatgtttggcctaaaatagttcagctgactctgagggtttacattgacgactgagcaagtggcaataatggctgtgttattgaggacagaaggctgtgttagtgtgcctgactccatctgttcaaaagggtgaatgttatgttggcagctccgcattctaggcctaaggtttggagggcacagggaatgctgacaggccataatacctgggcaggggggctgccctgatgatgtcatcagaaccatgaccacagggctacatgtccccccaaggatgggagacagggaagacaaagggtcaggtaatagggataggtggataaaacaaagagtagaagttgggagtatagtagggaacagaggatgag

SEQ ID NO: 156 - DNA, 615 bp, Homo sapiens
  misc_feature (32): n equals a,t,g, or c
  misc_feature (34): n equals a,t,g, or c
  misc_feature (38): n equals a,t,g, or c
  misc_feature (89): n equals a,t,g, or c
  misc_feature (287): n equals a,t,g, or c
  misc_feature (614): n equals a,t,g, or c
cggtccggaattcccgggtcgacccacgcgtntngatntggtgaaatggttagcagcatggactttggaaccagatagacctagatacnaaccacatgtctaacacttgctacctctgtgaccttgggcaaccccctccctcagcctcagttttctcatctgtaaagtggggagaatttccatcaagattgtccggagacctaaatgagataattcctggaaagtgtttagaacacagcatgtggtccctcaataggccgtggctgacagtacttttattacttganttttgcttaaattaaaactttatgccgggccaggtgtggtggctcacgcctgtaatcccagcactttgggaggccgaggcgggcggatcacctgaggttgggagttcgaggccagcctgaccaacatggagaaaccccatctctactaaagatacaaaaagattagctgggcatggtggcgcatgcctgtaatcccagctactcaggaggctgaggcaggagaatcacttgaacccaggacgcagaggttgcggtgagccaagatcataccattgcactccagcctgggcaacaaagagtgaaacttggtctcaaaaaaacaaaaanc

SEQ ID NO: 157 - DNA, 771 bp, Homo sapiens
  misc_feature (25): n equals a,t,g, or c
  misc_feature (771): n equals a,t,g, or c
gaattttcttggaggccgaggcctngcgcctctgtctgcacccaaggcgaccgccagcttacccccggctcttctgagcacagggaggcctcccagcaaagcctgaaccctctaagtttagctgcaggcttcgaaccccgaccgtccccgccgagccttgggtgctgaggtggggatgaactgggcgaaagacacttgggagttaggaagaaacaaacaagcagggaagtgaccaggagacaaggtgagactttgcccggctcaggtctgaactgagtgttggagataaccacagttaacaaaataaacaaaattcttcgcccccgtggagctgttagcaaccctggtgcctgggaagcctggaagaggctcgggttagtaacaacctccaggatgccctccgaactggtactggcgccgggactctagacaaggtccagattcccgggcccttccccttacgggtgcaaaaagggagggtcaggacctgccagycctggcttcaggatgttgactggacggacctggactcatgggaactgtgcgccaaagtcctgggagcaaagtgtcataacgctcctcgtttgtctcttgccttcacaggagacagccctgctgcaagcggscagtgggaatccttggcctttgggggtatgatccaagaatgtaaacgctagcttttcagtgttttcgatttcgtgatattcaatgcatacaatacaatgkgactcttgaagcttaataataaaattatcattcttggaaaaaaan

SEQ ID NO: 158 - DNA, 462 bp, Homo sapiens
ccaattttaaggtttatttggttgaagaggtgtcaaaaatttaaccagcattcccttttgttcacttctccaaagtctcagaatggaggcaaacttcacaacaaatgggcagcagtttttggatctgctctccaaggcacaatttttctaaattatctaaactttaggtccctgctttcctcaccaaccagagactttggagaaataaagagatatcttgacattagaaaggtgatcaaactattaccatttcattaagcacaaaaccaggcaggttttagtagaaataaggataaaggattacaccacagcaacatgggacctgatcatagtaccaaagtcttcaggtaaggtgtcaggctcctargtcttattaccaaaaatagctcaaacaaaaaccgagcttatataaagattaagaggagaaattctgcaataacatatccaaaaagattaagcagg

SEQ ID NO: 159 - DNA, 480 bp, Homo sapiens
caacccccacacctccacaaacacacaaaaaccttgaaaatctggacaaaataatgaaacaatgggttttagactttggacaacagcagtgcaggactgtgatccctaaaagaagggaaacaaacaaagtgagctttacagtcacccacccaccctggctttttgcctggggcacattctaaattgtagatctgggacagggaatcttgagcaaagaacaagatgaagagatagagatcagaatttatggaagctgaggcagcaagaagttgtagggcaaagttcagcaggaaggacactttgtcaaaattaatgctatccatagaagtctctgactttttgctgaattctagaatgaacatacatggagtaaaactgtaaagccagacaaagagcaaccagattgatgtgaactgacagacatcagaggtcacagagggctgggaagcatttgaggttttactagctagaggggaaagt

SEQ ID NO: 160 - DNA, 457 bp, Homo sapiens
aaatggcccgcctgcaggtacccggtccggaattcccgggtcgacccacgcgtccgttcttggyytccctgggctttgattccctcatcagtcctgcctgcgctgccaggcttctgtgagcctttaatgagcctgtgttgacagatgaatgcattcttgggactactaatcaacgcatacaactaaggccaagagaagccagggtttctaccccagggacccccttggccccaccctctagccctggagctgggtccctctgcctctcccaggatgcagtcagaggcctgagcttctggaaactcttggatctcgtccctgctcctcccagtcccacctcggctccaggtgtctatctctccagctattttctgatctggagttcaaaagaacagatctaggagcaacagccacggggaacaacagccagcaggctagttcatgttggcccagctga

SEQ ID NO: 161 - DNA, 444 bp, Homo sapiens
atgtatgtacaagaatgtgcatagcagcattgtttgtagtagtcaaaaattggaaacatccagatgtctgtcaactgtagaatggataaattgtgttatgttcatatactataatatcatacagcaaagaaaatgattgaaccacagttacattcagtatcagagatggatctggcataatctggaatgattcaaaaaaagcactaaagaatataaacagtataattccatttatgtaaagttcaaaaacaggcaaaatgatattgaataagaatatagctcactattcttaaaatgcaagaaaatgattttcacaaagtcaagataatagatactttaaaagggagggatggagttgtgattggagaagggcacatgagtaggcttttaggactctggcaatgttatttcttgatctggggaaaaagataaagtaaaaaaaaa

SEQ ID NO: 162 - DNA, 768 bp, Homo sapiens
  misc_feature (118): n equals a,t,g, or c
ttggaacgacccactatagggaaagctggtacgcctgcaggtaccggtccggaattcccgggtcgacccacgcgtccgacagaactcttttcctgggttttgtgacatttctaattgntgtaatttcttttgccattataaaaattagtcacttttgaacctaatttgtattcatcattctgaatctttttctttaaaagcctcctcttttccaattatataagctcataccccataaaacctgaatctgcccctagtaattactaataaggctagtaggagcattcttgttcaccttctgtgcatgcgctggactctaatttgaacctaggattagcactgcggcatcagaggctatgggggctgttcagctttcaaagataaagcagaaatgttttcaaagtggttgtaccaatctatactgccaccagtaccgaccacaattctctctaaatcctcgttattttcacacttcttactttttgctagtctacccagaataaataccatgtttttgtcttaatttgcattccgtaattactgataaggctgagcactttgaaatatgttattcattcatgttttctcttcctcttctaaggatgtgtgtgtgtgtgtacatatataaatgtatatataatgtatatatgtatatataatgaaacattcttttgttaattgtatgtgttgcagatatcttctccctgtttatagtgtgttttcaaataaaaaaattttttgacttattttgaaaaaatcaaccttaaa

SEQ ID NO: 163 - DNA, 884 bp, Homo sapiens
  misc_feature (59): n equals a,t,g, or c
  misc_feature (851): n equals a,t,g, or c
  misc_feature (853): n equals a,t,g, or c
  misc_feature (864): n equals a,t,g, or c
  misc_feature (871): n equals a,t,g, or c
aagtgaatgtaatgtcagtagactcttgaaaatgtcccttaccctctggatctgttaanaatgttattttatattcaaagttcaggttgttttttggtttcatcctctcttgcttttttaaagttgtatatgtgattatgtcattactggaagagtcttattcctttcccttaatctctcactcttgccccctgcccctgtgtaggactgaatacttcattctgttgtagagggtctttgtacacagtacattattacattatttaatttattcactccccacctgtgaccttcctttctctgatgtctccttactaattccttcactttcacttttcctttcagctgtcatccactctttcctttttacttatctgctgaattaacttgctcacactgattaaccctcttttgtttgttattagtgctgcttagagtctttcttctattttctccatccagctttccttttactctctcattctgactttgcatccccagtcatgctcctagcctttaaagagttatccttagctacaagaaaaactggtaaataaaaatataaaatgaaacaaaacaaaaacttcacattcttctcacccgtctgcttgtgtatctgagcttaagttttctctattttcatttaatttcacccttaggacacaggccatttatttagtaaacatttgtttaatgtctgttatgtaccaggctctgtgctagagaaaacaaagtctgctctgcatgtgcttacagtctcttggggcattgtgcatcaggggtgcagggagcgacagacatgaataaattatcatagcgttgagattaaagctctgttgaaccaccagganancaagttcctgntgccaangagatttgaaagg

SEQ ID NO: 164 - DNA, 448 bp, Homo sapiens
  misc_feature (6): n equals a,t,g, or c
  misc_feature (251): n equals a,t,g, or c
aatggngcttttcttttttcagttaaatgttagcattgctatttttcattattgcaaagcagcacatgcttgttaccaaaaactttggaagtgtagacaaataaaaagaagaaaaagctacttccaaatcctacttaccccaaagacaagatgatcatttagtcatatagtatcatacatatatwatatgtacmcatatattttaatgtaagtgtagtgtcacaatatcatgtatagtctttcataaaacnacgttggcacttaatatcttatatgaacaactttctagagcaacaagcttagtttacagcaattgtaatgtaagagtactcatttacatagctacagcatcctttgkttacctcatctcttatggtttgatgtttaggttgtttccaacttttctccacctaaacagcattaataaatgtggttttagtttcctctt

SEQ ID NO: 165 - DNA, 375 bp, Homo sapiens
  misc_feature (61): n equals a,t,g, or c
  misc_feature (71): n equals a,t,g, or c
catgtcattttggtactcacaggttgactgcagaggagaggaaccaagctatacttgaccntaaagcagcnggatggtcggaattaagtgagagagatgccatctacaaagaattctccttccacaattttaatcaggcatttggctttatgtcccgagttgccctacaagcagagaagatgaatcatcacccagaatggttcaatgtatacaacaaggtccagataactctcacctcacatgactgtggtgaactgaccaaaaaagatgtgaagctggccaagtttattgaaaaagcagctgcttctgtgttatttctcccaaaatacatgtaaaatcttgcacacatcttagctgcattggatgttgagggaa

SEQ ID NO: 166 - DNA, 499 bp, Homo sapiens
agtgttttaggaagttgtcccagctaagattttagctgacagttgagatcaatcactagacagacaagtgagtgaatcttcagatggtcccagcttccagctgttgaatcttcctgctgagctccaaaccttgtgaacaggatgattaagttatctctgctatgctcatgagcgtaagaagtggttgttttcagcttactctaagttttgggggtgattcgttatataactgtattaaccacaacatcatgttccatttttaccttcgctgtcaggaaactcaaggtcaaatttattccttaaatacagcaactgcaatagccttaagtgttagaacaactactttttaattttataacactgagcatatatttctattttattaatcttattttgtctttcgttgaaaaaatatgaagtgtacataaacaacaaaatgacccctacctaccccctaataataaaagtatgaatttaaaaaaaaaaaaaaaaaaaaaaa

SEQ ID NO: 167 - DNA, 413 bp, Homo sapiens
  misc_feature (35): n equals a,t,g, or c
  misc_feature (37): n equals a,t,g, or c
ctgcaggtacttggtccggaattcccgggtcagancnacgcgtccgattcagtgtaagggttgtgctgtgtgtcagttatatgatttgatgtatggagtgtgctgtgcgtcagttatatgcaagtactacaccattttatatcagagacttgagcatctgtggatttgggtatctgtaggaagatctaaccattgcccactgatactgaggggtgactgttggcatggctgtcacaaatcccagaattcactgtgtatttgttgtcttagtcttcatcttaatcagtattctaggatttttttctacatttttgcytgtggtcttcactaaaatattttaacttttctgccctgtatcttatcttattttgacatttttatattatgyataatatctcattttgaaaacttaa

SEQ ID NO: 168 - DNA, 497 bp, Homo sapiens
  misc_feature (467): n equals a,t,g, or c
  misc_feature (471): n equals a,t,g, or c
tatacagagaacaggtgtccaaagagaaatccattctcgcaaagccattctttctttcacacasagtgcctaaagmctccatagatggtsaaggctatagtgccaaaagtcagcccaargagactacctcctgataaatcttggtttggtggagatgtgtggtcccagattttttcagggaaagtagcagtttggtggattctacatccagtacccaggctgtagatagcatctgcaaatgtaccaagaaacagtcttaaattggaaatggcaacagccaaccctcagggatgggaactgcagtgaatcactattgtgtgtgctgtctgagatggtgatatgcatgggatgtggtctaatcttgtgatccatcagaatcacttccargccattaagaataatgtgymgcagctcaaattataataaacagtatcaggcaataaacacacaaatgacmwagaawaacnaaanggacaaaaaaaggggggcctttttaa

SEQ ID NO: 169 - DNA, 592 bp, Homo sapiens
tgttcaggacctcactctttgagagctggactcccacagtgaaaagaccgccatggtacctgcccaatacagccccttgagtgttttgaccattgagccsgatggctcaattscctatmaagagtacgawgwtatgatwgctmcaaagtgcacctgtcgttaacaaatggtcctcttaaaaccttgagcctatttggcaaagtaactactgtgtgccyatgtgtgccttcaagagaaagcttcatatattaagtcyctaaatgtagcatatgttatataaagaggagcctgtgtaggttagtaccttctatggcatctatcaggataaagggataacatcaattgttgctacagagcctttttttatttccaaatttaaatgaaatataattattgtggagaactttacatttttttccttgagtgattttttttcttttcataggagtcttattcttgatagggaaaaaaccttaattagcatcaaycctggatggacttgcagctataaataggcaattcagattgctgtagtcttaatagaagaataaatttctgtcaatggcaaaaaaaaaaaaaaaaaaaaaaaaat

SEQ ID NO: 170 - DNA, 404 bp, Homo sapiens
cgccaatcccgacgggcccgtcttccagccccgaagcggtcacctcctgacctctagtggcgagcgcggggaactgcgccccggcccgtccgcccgccgagcccgggccgtgcatgccgagcccgttgttccttcgcaaaccgagtgaacctcccgatgcatggactctggctgtcgtcgacgcagactctcgtgcactgcttaaccccgttttgctgccatgtgacggctgcagacactgtcctcaaactgcagtcccacagacaagttttgtattttggtctgacctacccgaaggtgtcctttttaagtcttatttgttaatatttataatgacatataatccaaagtaaatggaaacgtcatattgcgatctcaaaaaaaaaaaaaaggggggccctttt

SEQ ID NO: 171 - DNA, 493 bp, Homo sapiens
aggaggtttgtaaaatttctgctgttcagtctgggcttctgggaagtcagggggtgctgcatataaagggcaggaaaaggagcctgactccaattgctctttggtttcttccctgaatggaaggctcaaaatcaagtttccacccagataagatcttgaggtcctagtggaccaccagctctactcctgagctcttgaaatacctctaatcaccagctcggtggctgagagtaccttcttgtccactgcctcttcttttccttctcgtcttcacttatcccccatccaacttctgcccgataatatctcccctgtattgtaaactgaggagaaagttgcacaattgtagagatgaaaaatagctgccatgtatttagcttaaattagctcagaagaaaggctccctccctccattgagcgggcagcacttgtttatgccaacatgctatttgcatcgcgccttcttaaatttgaaagtctaatgattaaaaac

SEQ ID NO: 172 - DNA, 591 bp, Homo sapiens
tagagatgtggcccagttcagaaatgttgtcacacaattggaagctgatttagacattaccaaaagacaactaggaacagagcgctttgaaagggagagggccgtacaagaacttcgccgccaaaattattcaagtamtgcttatcatatgagttctacaatgaagccaaatacaaaatgtcattcaccagaacgtgctcaccatcgatctcctgaccgaggcctagatcgatcattagaagagaatctttgctacagagatttctgacacctgaaatgattcttcacatccctgagaaaggtcaaagttacaaactgatttttttttttttgctacatgagtgcatttatcttttaaatgcttggcaatgttaaatgtatttattaactttgtgtctctgaatctctgttctaatgtgccatgttgcagtgatctgagatgacttataaaaacaaaaatgtatatggctctttctatccatgcagtgatagtgagtgtaaaatctgcttacttcactattgaacactattctgttcactatctggagtaaataaagaagcttattaaaacaggaaaagtgtttttacaaa

SEQ ID NO: 173 - DNA, 359 bp, Homo sapiens
ttgtcccggcccctgaggcgcaggcctatcagcctcctgtgtcttaagcagagtggagacgggggtggatccaggcgcaccagttccacgccacaggcttctgcagttcctgcaaactgttcccatcccgccccgcgttgcacgtcgggatttggagttcgcgatgctgagagctgtttccacgtggcgattccgacttgacccgtcgtgctccggcgcccgcctagggggaccgaggagtttgtcatttcttgcctcgttagggtgcggaacgaaaaccatttgatttatcctagaaaaggaaaggctgaagccaactaagtaaaagttttccattaaatgaatgcacgttgtaaaaa

SEQ ID NO: 174 - DNA, 555 bp, Homo sapiens
  misc_feature (542): n equals a,t,g, or c
  misc_feature (548): n equals a,t,g, or c
gttctacacgagttcatcgatgtgtacttcatcgccaccttgtcattcttgtggaaagtctccgtcatcactctggtcagctgcctccccctctatgtcctcaagtacctgcgaagacggttctctccccccagctactcaaagctcacatcataggccgtgcgttcgctggagggggccctggtcttggcgcttccctgatggacagagctcaagttccatttatattaaccgccacctgtggattttgcagtaattgctaacacatgcagttttaatgggaagyggctctgcgcctaaacggagtcctaacgctgcatcaacgggagggagggtcctgaaagagacccatctgggcctgtctgaacccctcgttcttcatgtttaggtgaatatgaatatgttaaagctggtggctcagctgggagatttatatgggtcactgtgcgagcttccttatgacttgaattttgttgtcacatgataaaagtttctgtgtagctgaaaaaaaaaaaaaaaaaaaaaaaaaaaaaaaaaaaaangggggnccctttt

SEQ ID NO: 175 - DNA, 486 bp, Homo sapiens
gctgctttttcccttgttttttttttcttccttttaaaacaaagcagcgattcattccctctcccccagcagcgcggtcgggtgggatgggcaggcgagaaggccgttttcctagcactgacctacgggtccctccctgaaacgcggtgtcagatggttactgattaatattttggagaggccgcggcggcaggcagcgggtgagtctctaatcttctaaaaggggttcctatagaaacgcggagcggggcgcgccccccgctcggcccaggcccgggctgcggcgcttcgcacagcgcgcccctccccaaagcccctctttgcgtgggcgctcccctctccttccccccccgccaacaaaaaatcagagcagaaaaaaggattagatcggctgagcgcgaactgaatccctctcgattctgacatttcagcctattagcatttctccacggagccttctgaaacctattaaagtgtaatattaaa

SEQ ID NO: 176 - DNA, 252 bp, Homo sapiens
gcggacgcgtgggcgagtttgaagatgacactttgaggcatcgtgtctatggttcattactacagaagcttctctggatgtgtaaagcacaggaaaccaggcagaggaggcacagggtgctctccagaacgagaagccagctcctggagttgtttgctgcaactgccattccccgttgatgaccatgctcttccttcagaagagggagagtgagaggaccaagtccaagtggttcccatttgaacatttaaa

SEQ ID NO: 177 - DNA, 386 bp, Homo sapiens
  misc_feature (374): n equals a,t,g, or c
  misc_feature (379): n equals a,t,g, or c
ggtagcatggatatttgcagatgcatatacattcataaagatacatttcatttcatcagctttaatctctagtaaaattaatgtggtatatgtatcctactcaggatactgaaatacacacatgcgtacacatgattagtttctgttgcatacatatttacaacaatactagttcttaacgtatgttttactttcatttaataatgttcaactttggaaaatacttttgattatttgctaagaataaggaattcagcgctgcttgaatacagctcaaatttgttatttgccacacaagtttacatatatgcatttaataaaattttatagtgatttaataattcaaaaaaaaaaaaaaaaaaaaggggggggcnggttntaaaaga

SEQ ID NO: 178 - DNA, 444 bp, Homo sapiens
ccattaaaaaagaagaatagatttgcattcagcaaaaagctaataaacgtagttgataccctttaagttatgacttgcttctgaaggttaagataacacatgagattacaggcatgagccaccacaaccgtcccactattttactttttaaaatgacattcctactgattgatttttatcttgctataagttcgatgacaccgtgaatctaataaggttcactgttgacacagtacaagttacatagctaaaatacatagcattgaagactaattttaaggattgacaagagtttattttctattgtgcaatatcttaaaggaagcaaccacctttgggaaagtgtatctgctgctcctagggccatgcttgtatacatatttaaataaacatattcatttacccgaaaaaaaaaaaaaaaaaaaaaaaaaaaaaaaagtcgac

SEQ ID NO: 179 - DNA, 437 bp, Homo sapiens
  misc_feature (136): n equals a,t,g, or c
accccctcaggtcccaggagctgaagtgagcatccactcagttgaccagaaagcatctagaatgtgtcagcgaaaggcactggaattatcattccttcttgagaaggaaagaagaagaaagaagaaggaggaggcnggagcaggaggaagaggagcaggaggagcaggacaaggaggaggaagtcttcttcccttgaggaattcttagtctcctgggaaagatagctctttatactgataatatgccacattttcttatgggtcttgatggacatgcacaaagtttaaaaatatcacaaaaaggagagatgattgagagtagctgatagagggtgaaagcagactttacagggtactggatgccgtaatagagctgtgagcactaaactggaatgtgccaaacacaagagagaatcgtggtgcccttcctggtagag

SEQ ID NO: 180 - DNA, 429 bp, Homo sapiens
tagggtcttggtttgaatccagactagaaaatcattacttattaaaagccttgaggatatgggtctaggaaagtctatgtgaagagataatagkttggaaaaagttttgcagaactaaagaaaagtttccacagttaccttttctgtcctaatgtagagcatctttgttaactaggtcttggatcaatccaagctgtgtctgagaataaccatttataatttctcactggccagcactaacaccctttagaaaaggaactcaaagcagccctagcagccagagtcatgcgatcatggtgggagtacagctcctcaccaaggtcagctcctcagtgaaatccatgccttctggaggactgcttgtaaataaatattaagcacaaccattaaaaaataatttggctgtgaccatcaaatagtgaaaaaaaa

SEQ ID NO: 181 - DNA, 809 bp, Homo sapiens
  misc_feature (61): n equals a,t,g, or c
  misc_feature (128): n equals a,t,g, or c
  misc_feature (141): n equals a,t,g, or c
tgggtcaatctcaggttccagtctcagaaactgcaggttgttgtcacctttctgcacatgntcaaccccaaaatgtggaagtgttgtcaggcagggcagatctctactctcaagtatgaggggaatanaacaaagcagcantttagccagggttcaatgatagagtggaggtaaattaagacctccaggctgtgattcaccatttgagacattatacataatttgtttttgttataagccatttgaatttttaaaaaatttcatacatgcaatggaatatagatatgtatatacacatataatatatatgctaaagtataaagagtaataataatgacaataaacaaacccctgtgtgcctaccacccaccttattgcctttcctttgaggtaccgtgtgcggtttcctgaacctatctctatccctgtctgatagagggaacccctgtactgaactttgtgttgaccatagccttcttgtctttcatcactttatctccatgtatgtatccttaaagaataataaatggaattaaactgaatgtattcttctgtcacctcctttttatgttcattgccatcggagttttttcactgctaaatattattccattatgaatatatcacatgttctcttctccagctggtgcttattgaactgcatctttgtttgaaatagaaaaaggtaatgttgctctgaatattcttttatgtgacttctggtgtacatactgaagaatggatgtataccttgaataggaattgctggttwatacaataaaagcacatcatcagttttaaaaaaaaaa

SEQ ID NO: 182 - DNA, 249 bp, Homo sapiens
cggcccagagcccagacccaaaaggagtgtcaaaaagtccaactaaaaaaatcctttcaaaaagggatgggccgggggccagttccctttggactcaaagtgtycagtgtctcaragggtaratgtgtccaaggaatgacgkgcagtttttgactatttccctcccctgacctctgcccttttacataaagcaggttggagtttttctcmtttccaaaaaaaaaaaaaaaaaaaaaaaaaaaaaaaaaa

SEQ ID NO: 183 - DNA, 676 bp, Homo sapiens
  misc_feature (188): n equals a,t,g, or c
gatttctgttgtgcatgatgtaccttttacatcatgcagggcattgtagcagatataggagttatgctttatttggtccccagcttcaggtgactaacagtccaatcagaatccatgcacacagagatcagcatgacacaacatgagaaaagaaatgttatgtggggaagtgtagcaaatggaacggncaggtgagaggccagagagatctaagaatgtcctgaaggaggtgagatttgcccttgaccttgatggagtggtcagacttgggaaagaagatgaataaagcctatataaactgagagttaagagtgaagactggagacagatggctttggcttaaatcgcagttctgctgcttgctatctgtgtgaccttgggtaagttacttaacctcagtttcccagttatgacatgggaatgataacaatggtgtcggtctcttgggttgctttgaggttatttgaaataatacctgtaaagcacacagctaaaaaggaggaatgatggtggtgatgcagggagaccaaagagtgaaacagtctagagtgaagcgaatgtgttaaaatccagaggcgatcaagtgaagccagcctttggaggcccgtagaagtcatttggaggaatttggacttcgtgcagtaggaaagagggaaaactgtttttagaaaaaaaa

SEQ ID NO: 184 - DNA, 485 bp, Homo sapiens
aagggaacaaaagctggagctccaccgcggtggcggccgctctagaactagtggatcccccgggctgcaggaattcggcacgagctttgaattaaatacagttgtcttgagggtatgataagtccacaaaaaattggaaagcatcttacccattttcttcacatcccaaatttttatttgttccatgtcatagtgatgggaagcagttacagagcagcgtcttctgtgtttccttcatgtgttagatattggcaacaaagccagaggtgtaatgttggttatatgaagttcatctcaaaatggagaccatgaccagagtttccagatgatacacgttcttttcagcttcattaaataggcaactatgtttctaaatagtaaagtttcaaaatattctctcaatttaaaatttcatcctcttgaaaatctttgtyctttacaaaattatcttaataagttctatatggtcagcttmatcttccttt

SEQ ID NO: 185 - DNA, 328 bp, Homo sapiens
gctcgactgatttgcagctagagaaaatacagtaaaccctacattgcaatgaacagctttgtaagtaggaaaacagcaggccaaataaagctttccctctggtttttggcagaagtctacactttaatttcccctttctaaccaaaccattaatgaactcaacattataggaagctgtagaatggtgagattatctcaagaccctactctctttgacttcttatccaggtgttcaacaacgctcayttccatcttattcttgttacacatcttattcttgcttgtgagtggagcaatgaagtctataaaaaaaaaaaaaaaagtcgac

SEQ ID NO: 186 - DNA, 535 bp, Homo sapiens
  misc_feature (451): n equals a,t,g, or c
  misc_feature (498): n equals a,t,g, or c
  misc_feature (509): n equals a,t,g, or c
  misc_feature (520): n equals a,t,g, or c
gggcattagtgataagtttaaaaataggaaagcagagctcatttctgtgttgaaagttataaacttaataagtctcaggtttgttattctggagtagtggtttttagttctgaatcactaaaataattgtaataaactacagaaataatcttgccataatcacttacctatacacagttgaaaaagatactgtttgtgaaagaagtcacagtcaatgtgtttctgtagtgtcctatttatttacttttaaaatttctgtcttcttgagtttcttgkgctagtttcagtcattttgkttgkttgkttggtttwaatcaatagcccagagttagagttttagtatattgggaattcgtgccaaacatttgatgggagcgacacaagaggcatgaggaaggctgggtattaaaggaggcacttaactgtgggaggcaagttccagtctgggccnccagcttaacttttgttaacccctaaaccaaattcaccaggatgtcnggatattagcnctggggggttnggggtttttcctgga

SEQ ID NO: 187 - DNA, 718 bp, Homo sapiens
  misc_feature (115): n equals a,t,g, or c
gggaggaaaaaaatctttccttagaattcataaccaaaatacagcctttattgcagattatagctggaattcacaatatttcgaaggcaaaaaaaaagttaagctgaggatttangtataattagtgcatgaactatagtgctctgttgtctattagaagcaaatattttgtagggagttgtccatctcacacctcaacatgttttgcacagccaaagttccaaggaaaatgaagggctacctcatagtaaagaaaaacattacatacacaggggaacaaggtatcagcagaaacagcaatcagacacagaatataaaatgtttaatgtttcaataaaggagaggcttgaaaatgaatgaagatgttgagtggaaaaagtcacagaaaaacacctacagtcgattcatttatataaagatatctatcaaacagataaaaccaaacaatatactttgtgggagagcaatacacaaacgcttaaaacaaaactgtaaagaaaggagtgataatagaattcaggatagtggtccctttttgggggargagagggttgtgatcagaaaggggcatattggaggtgtggtaatatttkgtttcttaacctgggtgtaggaacatgagcatttactttgtttttaaatggtatattttcacatgttcttgaacatatgctaaatttctaacaaaaaggaactatgtaataaacatgtaatatat

SEQ ID NO: 188 - DNA, 669 bp, Homo sapiens
gtgtgtgtccattgctgcaagaataaaagaagcagtaacagaatcatgcagcgcagtatttcatggtgacagttttatgtggttgtgtgatgttgcagagtcttgtaggtgatatctacccttttcttttgaatcaaaacacggggttttactggaggagggaagtttcagaaacaacctagtctaacacaaaattaagctcctaaatagttatcccattctgtctactacaaaactaattgcttacaggaagtagaagtacacatatctaatatttatatcctgtttgagtagtggtttctaattttagatttctaacccctttttacattatctttttgcattgaaattatactgaaacattcatattattatgaatgcaagctgaattaaatagaccaagattctcggtttctcccttcatgttgtcatctactagagaatgaacagcttaaaataagtgcatcagttcctcatccaaagggaagctgaatattccaattcaagatcactttgcgtgcttactggaaataccatttttgaacgtacttggcacttaaagtgcccaattaaaagctctgktgaaagaggaagtctgkggatgtgcaattagtccttargattcagagcatttcctttatgtgtggaggccatatatgaatcactggt

SEQ ID NO: 189 - DNA, 480 bp, Homo sapiens
  misc_feature (361): n equals a,t,g, or c
  misc_feature (372): n equals a,t,g, or c
  misc_feature (439): n equals a,t,g, or c
  misc_feature (471): n equals a,t,g, or c
aaactggccagaggcagaaagaagcagagatcaggagggggaggtcgagggctggaacttaagagatttgaaatccctttacgtatgacagtggcttgtgggatgaagggcactacaaactgatcagtgatagccagactctggggmaatgtttccccacaattcaatgaaaaatcttgaacgaacccaattagattagtattttcagtatttgagagcaaaagaraaccacttaagtgctatcgtatgtgagctgmgtaatggtattaacttacatctttatacaaatgctccaatctcaaactgaaattttgaagaaaataycgacaaaaatgtatttgtgtaccctgggacttaaatnggcccattaanttaaaaatttatcccggtaggccattcctttttaggctccacctttaaccagacggatcttgggtcnaggggactgacggaactttttccggtaaaagnaaggggcca

SEQ ID NO: 190 - DNA, 475 bp, Homo sapiens
aattcggcacasgggaagggagacctagtatgagactcaggtctccaccctgacttgactaggakgctgatttgcactcaggacatgcagcccttcaaggcatctcaaattacagacatgaaacaacagatgcctggatgaattttacaagcagggcaacagtgmggaagaaggctgtgtagcaaaatatacacttagactccagacctatggctttatcttgtcaatatcattaatattcacgggacccaagctaaggctgaagttagtgagccagctctgggtctggcaatgtactctagtgagaagatcaccggccttgaagtcaggcttgtgtctgaatcacagctctgcattttaactagctgtgtgacctcaggtgatcaccatacttctgagcctcaattkccctatctgttaatttaaataagggtgttggtatgtcaccaaaatcccttctagctctaagatttta

SEQ ID NO: 191 - DNA, 747 bp, Homo sapiens
ttttttggctgcaagggtgtctggtgtttaatctcaggttgctgccgcccgaagagcggtggccaggaaggggaagggttccagtccagctcgctcccgtttctagatgctcctgccgccgccgcagcctcatccaccaagattctccactctctgcccacagatttgctgggctgccggcctcagggttcacagtgagggctgtaggggcaactagggcgggtctcgggaggcaaggtaggcagccagggtcaccagggcagccgcatacgtgcacacgcccagcccgacggcgaggacccccagcaggaaggcacggcggraggcggcccctgccccctgratgtcccccttggcccaagccttgttggtctgtagaggcagtgggcagcagtgacccaggcatcccctcagtcccagacccttcccctggtccctcccccacccaacatacccattcattcattcatgcatgtattccaaaagcagatacgtagcacctactataggtcaggcactggggatgctgagtggttaataaaaacattaaaatggtaaaaaaaaataaaaataataaattttaaaaaataaataaaaacattaaaatggtatatgccactattctaactcatttgattctcacattgacccagaggtagcaattattcccactttacagatgaggaaagtgaggcacagggaagttaagtgacttgcccaaaatcttgcagagagctgggcaccgtc

SEQ ID NO: 192 - DNA, 334 bp, Homo sapiens
  misc_feature (321): n equals a,t,g, or c
agactggatttggtcatttcattaaattgcaagcttgcttcatgctgccgtctaagcccaagaattggttcaagtctcaaaatggacaaattaaaatcatttcaggtttatttcactttaagcaaatctacatacatgctatgatgatggtatgtgtgagcttggttttataactaaatttgaaagttgttcactttctgaggtaaatcaatgtggatttctttaaataatgctctttcccaggtgtctaatgttcgtgtctattaccaaaacttgttctatgtatggtttaataacaattgatgtgtacagtattttggntttaaacaaaaat

SEQ ID NO: 193 - DNA, 493 bp, Homo sapiens
aagcgattggggcaktggaaaccagccactgcactgcttgcaaaacctgagaagaaagaagagacttggttgaacaattcacactgtttttcaaaaacagctttctgaaagggcttgatcccccaaggttgcccacagcasgtaataccagagtactgggctctcaactgtggtaggaaggggaacagaagtgtcctatgcagttgagtttagccttctagggctctggagacatgtccagtaggggcactaaagagagcccccagatcccacctggcctgaggaggagtgtgacctgcatggttgccccatggaaagcccaggccctcaggaaaccagccctgaacatccccttcaccatgcacagaaatggagtcttctcctttttggaaggactaacagcttcactatgtgccaaggtgccttcacaccctatggttatcttacttcctatagttattttaattcctggccaaccctgtctcaaaaaaaa

SEQ ID NO: 194 - DNA, 812 bp, Homo sapiens
  misc_feature (705): n equals a,t,g, or c
  misc_feature (754): n equals a,t,g, or c
  misc_feature (756): n equals a,t,g, or c
  misc_feature (793): n equals a,t,g, or c
  misc_feature (809): n equals a,t,g, or c
ggcacggggatcctttcaccaggaagccactgttcatcattgtggattcgtctaatagtgttgcgtataagaatttcacaaacttgtttggacagccactagtctgcttgctttctcctacagcatatccaaaagctttacaagatcaatctcagcgaggtagcctcttcactctctttttgaacaatcctctaatggccttcctatttgtctctggattgtcaagcatgcgcagaggcctatgggaaaagtgtcaagaatatcttcgaaaaatcaaccgtgatattgcccagctactgactcattcacgttcaatagatcaggcatttctccagttttttggagatgaatttcttcgcttgctcctcacaagatttatcttttgttcagccaccatgaggatgcacaagatttttcgggaaacacgaaattatccagaatcatatccacaactgccaagggatgaaacagtggagaatcctcatctccagaagcacattttggaattagcatccattctggatgttcgaaacgtgttctttgagaataccattgatgactattaaaacaaaaaccctgttgtcgaaacaagttttcattttccacaaattttaaatggtgcagttttctaacgtgataagacacatagtggtgttacttagtttttattttttaatttaagggcaccattttaaaaacaaacanaaaaatggtcacacttttagggtaactggtttaaaatgcaacctttcangncttttaaaatcttaaccttggaattttaatttttgantttgagggatggatantta

SEQ ID NO: 195 - DNA, 556 bp, Homo sapiens
  misc_feature (413): n equals a,t,g, or c
  misc_feature (452): n equals a,t,g, or c
  misc_feature (485): n equals a,t,g, or c
  misc_feature (498): n equals a,t,g, or c
gaaactagaggtcagcaaattctttcttaaagaagtgtcatataataaatatttttgacttgtgagccatataggttctgttttgactgttgtagttagaaagcagctatagatactatgtaaatgaatggcttggctttgtctcaatggaaaactgtgtttactagaagaggcagccagcccacaggctgaagtttcccagtcgctgatagaaacaattgaatatgccatttaggctaataaatggatttaacctttggcatctcatgaacaatgtcttctgacttacagaacagaaagaataaaaataccaatgcaaggttaacagtgctttgatctttgttccttagttacctattcagttttcatgagtaaatgattataaacaagagttctcttatttggaatatcgnatttcagagctctccacctcactagatggcaattcccgnggtataatttctctcgggcaaatacactagagnctttatttatggntcttttcttcctcagagcctgtaaacaatatgctagtaaattcttttcatcctggctt

SEQ ID NO: 196 - DNA, 503 bp, Homo sapiens
  misc_feature (419): n equals a,t,g, or c
  misc_feature (456): n equals a,t,g, or c
ggcaacagaaccagacagaactctttgaatataattatatatcttggaaactgactcatcaaagctattagattacatrgcatcatttaagcatcaytgggctctgtacttttcattatctgtacttttcattatggagtataataggctttatttggyacagaaattgggtctaagatggaaaccaacttgtgatttttgaataaacttttggggattagttactttgatgttgtcaagatagcagcatagtaagtcctctgcctttccttttgatttatttataatttagaatcagtttatgatttaaaaaatgtgacagacacagtggcatgcaccagtaagtaccagccacatggggaaactgaggcagaggggatcactttgatcccagaaagatagagaccacccctggggcnaccataggtgaagaagccccatctccaaaaaaaaaanaatccaattcccaataccattccagaacacttttaatataccagatg

SEQ ID NO: 197 - DNA, 464 bp, Homo sapiens
  misc_feature (310): n equals a,t,g, or c
  misc_feature (429): n equals a,t,g, or c
  misc_feature (443): n equals a,t,g, or c
  misc_feature (449): n equals a,t,g, or c
ggtttttagaattttcattgaagatcaagaaacattttattcactcaacagtcatgttttaaccaccagctgcatgtccaccactgtactagatgctaagaagtatcttctattttgtaaataaagtcctaaattgattataattaaaagttggaggcaagggttatatgagaagtctctgtaagttgtgctcaatttttctgtgaatctaaaactgttctaaaaaataaatccttaaaaaggaaaaaaaagttggagaaaaaataaaacatatacagaaacaattgaagaccaattgcaaaccagtaanattttgtgccagaaatgttttaaaaatctacatatgaatactgaagagctatggagtataggaatgatcaacaacagaagaattaatctgattaagcttcttttaggagttgatggccnaaaattgaaaggcnattatnagggccttccacata

SEQ ID NO: 198 - DNA, 490 bp, Homo sapiens
gctcctacaggtaagacatttgttgatcagtcccaacagcctagaattccctaaatgaatgtacatattaggtacttatccaaactctttccatctgaataaaayaaaacgtggtgtctgaggttcattttttgttttatatctctccttgttgatttatatgtttagaaactagatatgtatatttgtctgtatgaatagctgtatatgctctatattgtattatactaaacatgtgtctccattaagtctaagctttcttttcctcatcacttcgttctcagaactcccgttctgacttatatttagcctggcaataggctgacgcatgtctcagatgcgagtacttacaccttttaacatagttagaattgggaatcccactcatcattcctgtttttatttgctctctcagaatggtcattgtgtatttccttgttgcatatgtggttactggccttgaactctggatgtagtggttatcaagaac

SEQ ID NO: 199 - DNA, 537 bp, Homo sapiens
  misc_feature (501): n equals a,t,g, or c
gcggcacgagaaaaacccaactacattgggttttatgataggagttaaataacagaggtttttttctcacatcgtagtaagtcctgaagtacaggttgctgatgttgtttcagtggctcaatgatgtcaaggtgagcatctttgtgcttctcttgtctcctcatgctcacaatgtaagtgctgaaattgtagctcttacttttgcttttgaggcaggaagaagaaacttggaagtgcttaccagytgcaggtgtmcctttttatcaaagaggcaagcttcccctgaattccctccagtgaatctctgcttacatctgggctggggggtaaaaggaagctaagagagtatatatctgactctatagcccctgtggttggaggcatcatgatagaggagggttggaaatagctttgagtagcccaagcaacagtgtcatttaacaatagggagccacaggatacccaaggggagacagtagttctcaaggagaagaaaagcantgaaccacttgggaagggcgatggcaagccatgacc

SEQ ID NO: 200 - DNA, 620 bp, Homo sapiens
  misc_feature (442): n equals a,t,g, or c
  misc_feature (477): n equals a,t,g, or c
  misc_feature (483): n equals a,t,g, or c
  misc_feature (556): n equals a,t,g, or c
  misc_feature (570): n equals a,t,g, or c
  misc_feature (578): n equals a,t,g, or c
gaaaatattaaaacttttattgtttcaatctaacaaatgaaatttaccttaattaacatttaatcaatggatcaacactgacatcctcacttggtctgggtgtcagactgttgggtatcagytatagtgcatgaggaaagcatgcaggggttgacagaggccccttgcttgytattttcaacatactgggatgaattataagtctgcatatatctagttaggtggatttatggatttaacaaaatcaaagttcacaaaacagataaatggcaagaaagattcctgcaaagaaactaaattgtgtgcaatactaataatgagagtggaagtgagccacacacatgtataggtcaagagcggatgcttctcctatgagacattaatggtgaagtaaaaatcaacaacaatctaatctcaacttgagaagatgtccagaaaaagngaaattataagcaagacaatttgataagatggaantggatncactattggtaacaaagaaacactttctgaaatttattccttggaatactgggctaacaattggtagggaagncattataattaaanggacatgnggggaccaggaaggttaactggccaaaaggtttttcatggca

SEQ ID NO: 201 - DNA, 558 bp, Homo sapiens
  misc_feature (383): n equals a,t,g, or c
  misc_feature (497): n equals a,t,g, or c
  misc_feature (530): n equals a,t,g, or c
  misc_feature (540): n equals a,t,g, or c
cagtcacactttttacttatgtatttacaagtaaaagaatatgtaaagacaattgagtattgtgcaacattgatgtgtatttataaaatagctttattttataataaagtaatatgtgtagatagtgtcatgaaggaaatattctccccataatatagtttcccttcttcatttcagcacatgaaattaaacaaacagaggaaacttcatctcaaacccatctaacctagtcagtaccatagtaagctgctttaaatcatatttaaaacaaggtagagtacaaataaatacatgcatgtaagacccaaattaaagcccctcaaaaatctattacttttaatttcataaataaattttttattgggcttaatttactccccgtntaaaataataatatggtttaagactaaatttttttggttcctgtcaaaggaaaatttttgatggtggtgaaaattaaccactgggaacatcattaaaaaatataggcctactgngtgcttaataccataaaatattaaaatgacagnaatattaagnctagaatttggccaaaaa

SEQ ID NO: 202 - DNA, 1857 bp, Homo sapiens
taaccctcactaaagggaacaaaagctggagctccaccgcggtggcggccgctctagaactagtggatcccccgggctgcaggaattyggcacgagctggatggcccccgaagtgatcaagtcttccttgttttctaagggaagcgacatctggagctatggagtgctgctgtgggaactgctcaccggagaagtcccctatcggggcattgatggcctcgccgtggcttatggggtagcagtcaataaactcactttgcccattccatccacctgccctgagccgtttgccaagctcatgaaagaatgctggcaacaagaccctcatattcgtccatcgtttgccttaattctcgaacagttgactgctattgaaggggcagtgatgactgagatgcctcaagaatcttttcattccatgcaagatgactggaaactagaaattcaacaaatgtttgatgagttgagaacaaaggaaaaggatcataaaactaacagaggagactggcgtttgtgcagaggcctgggctgtcatctaagtgaataatccgctgaaaaggtttcggcttggattgtcctgactgcaaagaccttcgtcccatgaggacctgagtgaccagggcttgagcagaggaagagggaatttcagcttctccttgtgcacaggaggagcccgtggccgaggggtcgccagtgtagtgtaatagacggaattcccttcttcctgctgggaatgattccggtgggtgtgaatctgtgtcgcaggagctgcgatcccgggaagaggagctgactcgggcggctctgcagcagaagtctcaggaggagctgctaaagcggcgtgagcagcagctggcagagcgcgagatcgacgtgctggagcgggaacttaacattctgatattccagctaaaccaggagaagcccaaggtaaagaagaggaagggcaagtttaagagaagtcgtttaaagctcaaagatggacatcgaatcagtttaccttcaggtatgatcttgtttttatgtttttgaaagatttttgtgtgtcctccttttaatcagttttctttgttcatcagaaccaggaaagagatagggaagtaactttgtaaaacagtgaatgaatgagtatcttcagctgtaggcttagattcatggttctaatgtaatggcctaatgagattccatgtaggaaacagcattaggagcacgtggtagtcacagcacacgaggatctaaccctcagcgtactttcatattgatggattaactgattgactccttttgaaattgaagcagaaccattttttagctgagcgtactgagccaatgtcatgtggcattgtgaagatgcaaaacaacgaaactgttaatatttcatcattacgttcattgcttccacaaggatctaggatgtcatctggtatctgggacactgatattgktgtcagcactttcaataaaatatatcaagtaccctgaggtactttcccatgaaggtttaaaatccttcagacacaaaaatcacccagtaaatctagggaagcttttttaaacattgkgatamcaacatacmaggattactaaatcattttagtaatgtgttaggagaaactaaagggaatagaaaatatatcaatcaatcaatacatatagatattattgactgataatcaaaatatatcgatcaatatagcagacatagcttgattcactaaattaagttctttaatattatatattctacttgttgtaaggaaaaaacaaatacctccatggtattttgtgattctttctagtaccagagcaggatgatgacagagcaatgcagacttcacttttatagaatctgtatga

SEQ ID NO: 203 - DNA, 443 bp, Homo sapiens
  misc_feature (373): n equals a,t,g, or c
  misc_feature (390): n equals a,t,g, or c
  misc_feature (409): n equals a,t,g, or c
  misc_feature (429): n equals a,t,g, or c
actcatctaaactaagggagctgggagtaggtggccataccttggccctatgtgagtgattgtgatggaaatatcagtaggtaaccaagcttatgggtctgtgcatcagtgatccacacacaacacacatcttggctgtcggctgcagcagccatgtgtcccctgaatggggaagggcaaaaggagctatggctatgtgcctggggaggtggtcttcccaacgggatggatgatgctatgtttcctgtctgagccttctagatgctaagtaaatgtgctcttagattaaagcctgttggcatcttcaggtgactgccagtttcaaacccactttttgctgcttcaaccaatggcatgcgccgggcaaacggtnggtgctgctggatattnggaagcagggcagtggganccccagtttcaaccaggggngggctttccagatt

SEQ ID NO: 204 - DNA, 617 bp, Homo sapiens
gggctgaaagcacgttaccagacaatgagcatcttgcccatggagctatawaaagagtttgcagagtatgtcaccaaccattatcggatgctgtgtgcagtcttggagcccgccctgaatgtcaaaggcaaggaggaggttgccagtgcactagttcacatcctgcagagtacaggcaaggccaaggacttcctttcagacatggccatgtctgaggtagaccggttcatggaacgggagcacctcatattccgcgagaacacgcttgccactaaagccatagaagagtatatgagactgattggtcagaaatacctcaaggatgccattgragaattcatccgtgctctgtatgaatctgaggaaaactgcgaggtagaccctatcaagtgcacagcatccagtttggcagagcaccaggccaacctgcgaatgtgctgtgagttggccctgtgcaaggtggtcaactcccactgcctcccatcttgctcctgcggtccctccttccctgtctctctcacccctgtttccacaccctcacctcctaccacccccctcagcatgttccctggaagctgagggtctctggggctcagtcccggtctctctctttctcc

SEQ ID NO: 205 - DNA, 429 bp, Homo sapiens
cagcatggagtgtaagaagaaatgatgaaatggtgctccctgaaacatctcttctttaaatttaattagaccaaattatacgcaaactagtagatgccctgggaaggcaatcaacattagggctaataaaaagcttgagtagtataaaaaggctgggggaggtgctgtggagcctttctaacgcctatgagaggcaaattaaaaccaattgcgaaacatggaaactggatgaatttcaatattgatttagaaattaattttattatgttgttctaaatataaaaataaaggctatacttattaatcttccagaatttggcatgttaacacctatgcacaaagcattttatggatctttatatgctgggagacacattatgggctgacttggaagttttggcagacctggggttcaaattctagcaactt

SEQ ID NO: 206 - DNA, 530 bp, Homo sapiens
  misc_feature (394): n equals a,t,g, or c
  misc_feature (448): n equals a,t,g, or c
  misc_feature (502): n equals a,t,g, or c
  misc_feature (518): n equals a,t,g, or c
ggaaaatggtccttaatacctatatagggttttttaaaaaactgtaccctataatgcagccacagaagatctaaataataaacaattgcgcatactattaatatatatttagagcttttgttaagtacatgaaaagacagtattgcatagtggttaaatgcatggactctgaagccatcctgtttgggatcatcctggctacattgcttactagctgtgtgacaatggatataggtgcttaatgtctctgtgcctcagtttttgtgtctatgctacatgtggtaccactggggaagttgaaggtattcaggaccacagaattggtaactggaaaccaggtctgtctttttcaactatgtccattagattgcatctgatattcaaaatttcaagnaagattctatcaaagaataaaatatgtaaggaaagaagcatatgaaggacatgnctggtatatttctggcattattgggaactcttaagtaataatgattatctatgngcttaatagatggcantgggtgtgtgtg

SEQ ID NO: 207 - DNA, 522 bp, Homo sapiens
  misc_feature (510): n equals a,t,g, or c
  misc_feature (517): n equals a,t,g, or c
gtgctggaaaggagcttccttacttattakgaacctcaggtggacctctcatggttgcagatggcttctcacttacaaaggagattgtgaccagctgttgagaactgtttggctttacttccttcagagaccagacttggttgtatgtcagagtagtcccccccttatcctcaggggatatgagcccagaccccccaatggatgcctgaaatcacagatagtaccaaaccctatatatgctatgtttttttcctatacatgcatacttgcgataaagtttaatttataaattaggcacaggaagagattaacaacaactatwaataaaacagaacagttatwaaaaatacagtgtaataaaagttatgtggaagrtgrtctctctttctccaaagtatgttattcgtatgtaattwttttcaggttgccgttggtatgggktagctttaaaccccggaaggggattcgcaattagggggggtttaccctatattcctcggttagggtccnctgactnttttc

SEQ ID NO: 208 - DNA, 424 bp, Homo sapiens
  misc_feature (45): n equals a,t,g, or c
  misc_feature (47): n equals a,t,g, or c
  misc_feature (48): n equals a,t,g, or c
  misc_feature (49): n equals a,t,g, or c
ttcggcacagtaaatatagctgtttttaacacttatattcaactnannngctctgcttgtatacgccaggctttatatacattggcggttttatttatgtctgtttaacttaggactgtgtacctaagtacagtccatcctcattattcttggattctgtatttgtgaactgcgtacttgctttatttgtaatcccccaaacagtactctcagagccttttggtcatttctggacatgctcagggtggtgaaaaatttgacttgcctgacgagcatgtttctagttraggttgaacaaggtgttgctctgccttttttttttttaagctctcrcactgcaaacaagtgtccttttcatggtctattcagtgccacatgttttccatttttgtggcttttttctgggtgactttggctgtttaaa

SEQ ID NO: 209 - DNA, 200 bp, Homo sapiens
tcctcgttggagagaggatggaagagaagacgctaagatagggctcaactataaggaatgaattgtagaattaagccacctgcctataatcagtagggctttccttttttatctcttttgctcattattatcacaccatatccctgarggtgaagaacaactttgaagargcaatgcctgataaatctggaataggggag

SEQ ID NO: 210 - DNA, 138 bp, Homo sapiens
tttctgtagctctctacttgagtcacttggagcagggattctgaacgctasasacctgaatacccagtttgtgaataagtttcctgtctctctcttasctgcttcacttcatattcttagtatctttgttaaagggaa

SEQ ID NO: 211 - DNA, 687 bp, Homo sapiens
  misc_feature (11): n equals a,t,g, or c
  misc_feature (13): n equals a,t,g, or c
  misc_feature (452): n equals a,t,g, or c
  misc_feature (555): n equals a,t,g, or c
  misc_feature (645): n equals a,t,g, or c
  misc_feature (665): n equals a,t,g, or c
  misc_feature (678): n equals a,t,g, or c
tgaaagactcnantttctgagtagcatgacatttctgcaggcaaaggaagtgagtatagactcccaattctcttcttttccaggatgtacactagaatctgaagcatcctcttcaccctcgctccccttcaagtttccgaagccactaagttggcaatgaaattattttgtttatgcaaggagcaaaatcacatgtcaagctgataaataatgtatgaaatatcatttagttaatttcaaaggcgccaagactatgacaccattgcatccattcagatgaaaccttggttctccctgtgttaggggagagatctaaatgaagtatgtcctttatatttagatgactagatctgtggccctcctggcttgtttttcagggcccttaatackgatcagaagaaattgctatcacaaaatagctttcaaaacagaacagagctttttcttattgntttcattccaaattacctgaacctcagctttgtctgatcttttcaggagcaagaggttcacacattgcattcacagtatgcctacaaagagctactgagttgnttttaatgcattttatgctacagccaccagtggccaaattataagccagaaatcttgtaagtagcatggcaaaaatcttcattgcaatgnaatttggttatgagtagatnataccattaaaanctggaagag

SEQ ID NO: 212 - DNA, 617 bp, Homo sapiens
  misc_feature (450): n equals a,t,g, or c
  misc_feature (473): n equals a,t,g, or c
  misc_feature (568): n equals a,t,g, or c
  misc_feature (591): n equals a,t,g, or c
  misc_feature (595): n equals a,t,g, or c
  misc_feature (601): n equals a,t,g, or c
ggcaagatctagtgatttggagtatgagggagaaaaaatatgggataagctcaagatgataacctcaaggcctaaagaatagattgtgttccccagcagatagtcattgatgccacccaagtgctgccattagcatttccacctgcagctcagtaggggccatgacatgttttattgttattgggagtcatgacctatataaaggctgattctctccccatccccctcctcttctggccttattatctcagatataatatctaacatctgtctacttaggtgagaggccctatctgtgtgactatccagactgtggaaaagcctttgttcaaagtggacagctcaaaacacatcagcgtcttcacaccggagagaaaccttttgtttgttcagaaaatggtacggtgttagaagttaagtttatggaataactagttgtgacttaacagntaaaatatcctttccttgaattnttttgaggggaaagattttttaatataaattttataaaactttataagctttcttctttgataattgggatcatgctgaatttctcagaaatgantgattttaaaaatttggtggctntganttttgngggtacccagtcgtat

SEQ ID NO: 213 - DNA, 678 bp, Homo sapiens
ttattgtgcttctgctggaagggtctcttgtatgggcgccccgtgaggacccagtccttctccagggcattcgagtctccattgcacaatggccagccctgacttttactccccttgtagataaactgggtttgggttctgtggttccagtggaatatcttctggatcgagagcttcggttcctgtcagatgccaatgggttgcatctgtttcagatgggaacagatagccaaaaccagattcttttggaacatgctgcactgagagaaacagttaatgctttgatcagtgaccaaaagctmcamgagatattcagccgaggtccctacagtgttcaaggtcacagggtcaaaatatatcagccagagggggaagaagggtggctctatggtgttgtgagccatcaggactccatcactcgtcttatggaggtgtctgtaactgagagtggtgaratcaagtyggtagatcccagactaatcyatgtgatgctgatggataattcaacgcctcaaagcgaggtacagtaatggactgcattcctgagcagactcatgagcttgcattatcttgctrtgtgtagrtcccttatatatgtgtttwccatggatgccttttgagttgttcagctttagccactgtacatttttttgctctctccacagtctgtctaattaa

SEQ ID NO: 214 - DNA, 767 bp, Homo sapiens
  misc_feature (742): n equals a,t,g, or c
ggaggttgccaagtggtgtgggaaactgcttcatgcttaagttcacttccatatcatgatactaaaaggtatctaacagctgattttcattgctttcatttgtgatctgctaggaccacttgatccttatactgcttattggcacactcctcatccaagagttgatcgcagaggcagagttccttgccaccagtccagtggaagtacaagccaactttgctctccaaatggcagcagkagctgagcaggccgccctgcattctctcctcataaacatgctgttctcaagtttgtcagaatccagagctctctactcattacccccttttccaaacaagcaagcaaagcatgctcttcctttgtttcccttaattgcctaaaacatctccatgctcatagctgttgactctctttgcctcctagttcctgttcctctggtgtaggatttctcagccctagcactgtaaacatgttgggctggataatcatctcttgtatgggctgtttgtgcattgtaggatgttgagcagcatccctggcttctacacactaagtgccagtgacactcttctcccctccccagctgtaaaacccaaatgtctgcggacattgccaaatgtctcctagggggcaaaatcacccctggttgagagtcactgctctatcatttattcactaaatactgctggtcagctgggtccactggcgaacctcacatcaataaacctggtaatagaagcanaaaaaaaaaaaaaaaaaaaaaatgt

SEQ ID NO: 215 - DNA, 482 bp, Homo sapiens
gaggagggcaggcaggccttactgtgaaggtggtatttgagatgaagtagttggtcagagtccctgtttgacacatggagaccaccttgacagcaaaggccctaagggggagcggtgcaaagcaaggtgggctggtgagtgagaggagagggatggcatagagctgggtgggggcacaggagcccgtggggaaggtgttcgcctctgaatgaagtggggttgtatcagataccacgggtgaagcatcgggaagaggatcctgcctgtaaaccctgctcaaggactgcaccatcatcatgcccagtgtgtgcgtgtattaggtttgtatgaatataatgttgccaattgtatctgtttttatgaaatgtttgctatgtgccaatgattattcgatccatggggagaccatagaagaatgatccaaggagttgggaggggaatcaaataataaatcagcgattctgcaatataaaaaaaaaaaa

SEQ ID NO: 216 - DNA, 834 bp, Homo sapiens
cttcatgctgtcagaataatttcttgacttagaatcagagaatcctagacttttctcccctctaaaattaactacatgtctgaatttttctccctctcttctgaatcctcagaaagcaagccctcttctctacactccccagttagaagatgcatctctttctctttagtgaccataaaactagacacacagtcagccttctgcatctgtggattcaaccaaccatggattcaaaatatttgaggaaaaaaaaagtacctctttactgaatatgtatatactgttttccttgtcatgatttcctaaacaatacagtataatggtgatttatataatatttacataatattaggtgtcataagtaatttagagatgatttaacttatatgggagcgtatgtgtaggttgtatgcaaatactacacgatattttatcagggacttgagtgtctgtggattttggcatcctcggggggtgcttggaaccagtccccctggatacctgaggagtgactgtactgtgtgatagcagcagtatgggatggaaagatgagatcctagtggtgcaggtacatcagttggacatttggtgtaactcaccaaaagtgaaaaaaacagagaaacaatatttgtggtgaattaagagattgagaagcaccgaattgaattgagaggtggttttgacttcctgaaatctccccacaccattttataactcctcagtttttccatttagctttacattcttctgtgacagagattcattcattgtctttccttactatgctttaagcaactcttacacttctgtatagaaaaggtgtttcattccctc

SEQ ID NO: 217 - DNA, 571 bp, Homo sapiens
  misc_feature (519): n equals a,t,g, or c
  misc_feature (555): n equals a,t,g, or c
  misc_feature (568): n equals a,t,g, or c
  misc_feature (570): n equals a,t,g, or c
actgcagcctcaaccccccgggctcaaacacccccaatttcatatcagactcacttgcttataacagcacacttcaaatccttctcagaccattttccaaccactaagaatcagtatatttcatgccagcttctgtcctagatactatggctataacacagttttcaaggaactcacaatttggagagagagagagaaatactaagtatgtaactagctgtcatagttctttaaaaaaaaaaaaagaaaaaaaagtaaggccaggcgcggtggcttatgcctgtaatcctagcactttgggaggccgaggcgggtagatcacctgaggtcaagagtttgagatcagcctgaccaatatgatgaaaacccgtctctactgaaaatacaaaaattagccgggcatggtggcatatgccatcatcccagctactcaggaggctgagacaggagaatcacttgaatccgggaggcagaggttgtgtagagccaagatctcgccattggactccagcctgggcnacaagagcaaaactcttgctcaaaaaaaaaattaanataagtaaataantna

SEQ ID NO: 218 - DNA, 828 bp, Homo sapiens
gggaaatgagttaagaggggtcccgaaatctgtagagtgctggtttgggggctcgccatcccaaatctgttccagcctgtcctgaggaaaatggagtgtaattaagggtgagcacccttaattcttgagctgtctttccagatacacctcgctgcttggagattcagtgaacctaagaaaaggtgcaaaaactatttaggtcaacttggagagcaggggaaggaagaaataagaaataaagaggtaccgaaagctggaacatacttcggagaaacacctaggccagccctctcactggaaacacagcacagcacagaacaaaacagacacagctcctgtccccgggctgacagccaagtaggagagatgaatgttcaacaatcttgcacataagcagtaagtgccatggtgttasccagcgttctccagagaaacagaaccaataggatggatatacagagatatagaaaaagatttattatgaggcattagctcccatgattatggacgctgagaagtacccaggatytgccctccgcaagctggagtagttccagtccgcgtctgaaggtgcaagaatcagagcatggatgtctgaagcagggaaaatatggtgtcccmcctcaaagaagagcaaatttgcccttcctctgcctttttattctattcaggtccttaacagattaaattatgcctgcccatagcggtgagggcggtcttctttactcagtctactgattcaaatactaatctcttccagaaacagcctcacaaatacacctagaaataacattttaccagctatttgagcatcccttagcccagtca

SEQ ID NO: 219 - DNA, 526 bp, Homo sapiens
  misc_feature (469): n equals a,t,g, or c
  misc_feature (515): n equals a,t,g, or c
  misc_feature (526): n equals a,t,g, or c
ggcaagaccggcgcgctgcattcgcgcctcgatctctgagagcccaccgcatgccggtgcagacggatgcgaggatgcagggacgcgcgacgccggccccggtcgcagccgacgacgccgccgccagcctgacctcacaccctctggcccgcctctggagccagcgcccagggtccctctgtgctttttcgctttcctaagctcctgtcgctcctctttgtcccctcagtttatgtcctcctgtgctcacctccctgacctctgtgaccttgcactcccctggcctgaagctgcctctctgcgcgctttctactgggctyggctctttccggagccccagcgtctcctgcccaaattaccgcggaaagggcccggggcggaagtgcgacccgggcgtcggcaggcraracctcttkggccttctctcamaggtcggtgcgctsgtctycgcgtttcccggccgaattgncgtgcaatccatggctagaacccgcccggaaaaggaactgatggcnggaaccggctn

SEQ ID NO: 220 - DNA, 458 bp, Homo sapiens
ttttttttttttttttttcctcmtaggaagttgttgtttaggatcctaattctagtttagaggtacattctaaaggatcttctccactgccattttctaaagccaaggagaaccccccgccttttgggtaccctatttggtttccactttggaggtgtattctaaagtgycttctccattacgttttctccccaaattaatctcagttggcttgtctgtgcatttttgtgagaaacttaaactgtcatttttagagataaatgagagacttacctcctcagctctgaagagaaaggacattttgttactgcaagctgcaagctgccccttgggtgactggggactgagtgggaatgtctgggtggttaaccccttttgacatgcagtggccctacagggaaccctcaacaaaattagttttaaaagactcattcaagaaatgcatatagagctgttca

SEQ ID NO: 221 - DNA, 823 bp, Homo sapiens
caacatttttgcgtttcttttctttgggggggtgggaacaggaaagggataaagaatccaattagtgttaacaaatcttatcaacatgtctccaaatttagactctgccacacatgtggctggaaagcagtggccacccaaaacaactctctaaaaagtaaaacatgtagctctgaaaagtcagataaagcaaacccatgccctcaagaccccgcaggaatgccattagggggcaggaggcctgaatttggctgtaggaatttagagaatttggaggttctcttccattcaaattttttcctccaagtggtatatactttaccataattttcatcataagccaaaagtctgacattagcctgaaggactgtgtgaccattaaagttagtaaattaaactaacttattctttacaaaagagtaaatcattcttttatccaaagagtgactgaggtctacactgcactcagcactgaggggagcgccacggtggaagggaacacacgtgggtcacagtcaccgcacacaaggtacttatggtctagctggggatgcaacacagccacacgccaaccagggagtgaacaagacagcatgatacatagtaaaataatgttccaggttaaccaggaaagaagcaagtgcgactgtgcctttggttactatgtcttttccaactgatgacatgaactatactgtatatttttctgaataaaaatatttttctttaaaaaaaaaaaaaaaaaaaaaaaaaaaaaaaaaaaaaaaaaaaaaaaaaaaaaaaaaaaaaaaaaaaaaaaaaaaaaaaaaaaaaaaaaaaaagg

SEQ ID NO: 222 - DNA, 440 bp, Homo sapiens
  misc_feature (46): n equals a,t,g, or c
  misc_feature (387): n equals a,t,g, or c
  misc_feature (439): n equals a,t,g, or c
accggtccccaattcccgggtcgacccacgcgtccgcaggcgtganccactgcacctgkccctcgactcacagattttcaaaatacttttgaacagtaagctgaggacagtgtttattatgactatactggtctcctttcactagctcacaaaatttaactacatcacttgtcagtctcctaaaaatgcagtgtatgtgctttgaaacttgtgaatgatctgctgatttgtgctattttatattcaatgttgttgaaagaatagtttttaaaccaagtaatgcaaaaatttagtgtaacatgaatgcttgtgctgtaaaacatactggaaaatcaatagctctggaataaactttggatttttaattaaaattgaaaaaaaaaaaanaaaaaaaaaaaaaaaaaaaaaaaaaataaaaaaaaaaaaaaaaaaaaaaaana

SEQ ID NO: 223 - DNA, 630 bp, Homo sapiens
  misc_feature (580): n equals a,t,g, or c
  misc_feature (583): n equals a,t,g, or c
  misc_feature (607): n equals a,t,g, or c
ttttgcagaggtagaccttttattttatagaattaaaaggttatctttaaaaaaaaaaagggttcctgtgaagattaaatgagttaatatgtataaagaccttagaatagagctgaataagctggaagtaatattatcttgagagatccctgcttagggaacagcagaaacatttcactcagttcatttctgtccacagccagtcccaaaggctccagaatctccatcgytggactcggccctggcttccccactggaccctcaagccctggcctgcaccccagcttcccctccagattcacaacctcctgcttctccccaggattctgaagccctggactttgaaaccccttcctcctccctggcgccccaaactccggactctgccttggcctccgagacccttgcttctccccagtctctgcctccagcttcaccactgctagaggacagggaagagggggacctggggaaggcctcggaactagcagagaccccaaaggaggagaaagcagagggggcagcaatgctggagctggtgggatccattctccggggctgtgtccctggagtggggttnacngccaatggccttgccggcgcctgnggcaagtctgcatcggccttcag

SEQ ID NO: 224 - DNA, 413 bp, Homo sapiens
ctcacacccagacatggatggagacggggtgagggtcctgtggtgtcagtgctgttgggcagcagggattgctcaggggccgcatctggatgcactgtcagcgctgtgtaaaccatgataacagaagctgcccatgaagtcaggtgcacacgtacctgctcactggcatagaaaagaacactaaggggaaagctttcctgcctcattggtaactgcatttgaagccgaacaagtgagtcattgggtttccgactccaaactcgtaaagactgggaacagaatggaaagtttagacactgacattggagatagatgattctttcattccatcatccattttaatgkatgacgtcaacataaatgkgkaacaagattcattaaactagkctcagaagctctaaaaaaaaaaaaaa

SEQ ID NO: 225 - DNA, 490 bp, Homo sapiens
aaaacctttatatgaatctgtatagcagctttatttataatctcaaatgtctggaaacaaacattcttccattggtgaatgaataaacaaatcgtggaacatcttwcaatgaaatattactcagcaataaaaaaggaatggagtatcgataggcacaacaaggaagaatttaaaatgcattgtgctaagagaaataagccagcctccaaggggtacatacaaattataaaattacattcatagaccttctaaaaatggcaaaactgtaggtctggagaacatcattggttgctagggaatggtgttggggaaaagaattgaccacaaagatatagcatgaggaaatttttgggagtgatgtatctgttttgtttcttagttgtggtgtgattacataactgtatgcatttatcaaaactcatataactgtacaccaaaagagtagattttactgtttataaattgaaaataaagtttttaaaagaaaaaa

SEQ ID NO: 226 - DNA, 518 bp, Homo sapiens
  misc_feature (118): n equals a,t,g, or c
tcctggctgcttcaaatcatcatgcaaaaagtattcacgggttcagaagattggtgaagacaatgagaaatcgacctgaggagcaaaacaaaggcatcagctcttacaccaaaagagnttaacgctgtaaccaaaggtatagttttgttttttattttaggagaactgactggtaaatgaagaaatggaccaaattttgtgtaaacgattagaaagatgaacaaagtattgccctttgactggttttcttcttcatcctgagaaagatacattctcttgcagctcttcattcattggtgacaagcccccaccccgggactttactaatgagcttgttaaagaggtgccaaagaacatattcctcctttctttattctttctccaccaaaaccctctacttcagaattttttcaggatatttttcagcccaaggtcagaagaatgtgttaatattttaaataaaatatctggacatctacagccactgtgtaaataaaaaaaaaaaaaaaaaaaaaaaa

SEQ ID NO: 227 - DNA, 346 bp, Homo sapiens
  misc_feature (11): n equals a,t,g, or c
  misc_feature (35): n equals a,t,g, or c
  misc_feature (54): n equals a,t,g, or c
tcccattatgnaaaccattaagatatggcctaagnttccttaactatacagccntctttacaataaatttcttgatttttgtgcacaggatagtattgcaacctgctatttagcctttggtgccttagaattattataaatatttaacaatatgtacataatgtaaatactgccaagagatcagtaaggccaaatattttctctattcactttttattgctcttgctttctattgctactaaagcctcttttatccagctttgtaatagttccaacattgtagcgaatgtaaatgtttactttcaataaatctgaacttgttcaayaaawaaaaaaaaaaaaaaaa

SEQ ID NO: 228 - DNA, 477 bp, Homo sapiens
agcggccgcccttttttttttttttttcacagcatattagaaatgtttattaagaataatggcatgaactgcttttaacaatttagaaaagacccattccccccgcccccccccgcccccagatccagggcacttcctctaagtaaayacaaatatttctgtagtgaactgtatgcatattcccactgagtaaaggttataagaagcctcaggtcaggtcttaccaccaaacttgaaaacacttggaatgcagctgggcagggacttgagcaggttttgtcttgataagcaggtaagaatggcagaacactggcttattgtcaaccaatgtttttttatatacctgaagtattcacagcaacttattttaagaagctttttaaaagttctacacctccacccccacaactccccaatccagaacatggaacaagggtgtggagctgtttgatggacttggtctgttcttaacattta

SEQ ID NO: 229 - DNA, 1661 bp, Homo sapiens
gcggacgcgtgggcggacgcgtgggcggacgcgtgggtgagtccagtgagccgacagtccataagaaactcccagaagcacagccccacttcagagcccacccccccgggggatgccctaccaccagtcagctccccacatactcacaggggctaccagccaacaccagccatggccaagtacgtcaagatcctgtatgacttcacagcccgaaatgccaacgagctatcggtgctcaaggatgaggtcctagaggtgctggaggacggccggcagtggtggaagctgcgcagccgcagcggccaggcggggtacgtgccctgcaacatcctaggcgaggcgcgaccggaggacgccggcgccccgttcgagcaggccggtcagaagtactggggccccgccagcccgacccacaagctacccccaagcttcccggggaacaaagacgagctcatgcagcacatggacgaggtcaacgacgagctcatccggaaaatcagcaacatcagggcgcagccacagaggcacttccgcgtggagcgcagccagcccgtgagccagccgctcacctacgagtcgggtccggacgaggtccgcgcctggctggaagccaaggccttcagcccgcggatcgtggagaacctgggcatcctgaccgggccgcagctcttctccctcaacaaggaggagctgaagaaagtgtgcggcgaggagggcgtccgcgtgtacagccagctcaccatgcagaaggccttcctggagaagcagcaaagtgggtcggagctggaagaactcatgaacaagtttcattccatgaatcagaggaggggggaggacagctaggcccagctgccttgggctggggcctgcggaggggaagcccacccacaatgcatggagtattatttttatatgtgtatgtattttgtatcaaggacacggagggggtgtggtgctggctagaggtccctgcccctgtctggaggcacaacgcccatccttaggccaaacagtacccaaggcctcagcccacaccaagactaatctcagccaaacctgctgcttggtggtgccagccccttgtccaccttctcttgaggccacagaactccctggggctggggcctctttctctggcctcccctgtgcacctggggggtcctggcccctgtgatgctcccccatccccacccacttctacatccatccacaccccagggtgagctggagctccaggctggccaggctgaacctcgcacacacgcagagttctgctccctgaggggggcccgggaggggctccagcaggaggccgtgggtgccattcgggggaaagtgggggaacgacacacacttcacctgcaagggccgacagmaggggacaccgtgccggcttcagacactcccagcgcccactcttacaggcccaggactggagctttctctggccaagtttcaggccaatgatccccgcatggtgttgggggtgctggtgtgtcttggtgcctggacttgagtctcaccctacagatgagaggtggctgaggcaccagggctaagcaattaaaccagttaagtctcccaaaaaaaaaaaaaaaaaaaaaaaaaaaaaaaaaaaaaaaaaaaaaaaaaaaaaaaaaaaaaaaaaaaaaaaaaaaaaa

SEQ ID NO: 230 - DNA, 878 bp, Homo sapiens
  misc_feature (35): n equals a,t,g, or c
  misc_feature (363): n equals a,t,g, or c
tctctctaactgggaagctcccacgcctgcaggtnccgggtccggaattcccgggtcgacccacgcgtccgatttttcccattctgcagcatttagacataaatggttcttcagattcttccacactgcccaaattggaagaattctgtacctctcttacccagtcagagcagtcagcagacgggagccagtctgaacccaacaacagtcagactcagccaaagcaaattcagctttccacagcagcaccctgttcaacaactgcagtggatgattccgcagaaaagccctctggttctgtggaaagctcaccagagatcctaaagaatgaagatttttctagcagccgtgctattacattgnacaaagacaagcgtcaagaatctgtagaccagstgctttgattttgkcttatgagtgccagatttctcagaagctytacattyctcgaagtacagccactgctgccttaggtgctgccgcacggttagctacatccaggagcctcctacactggtaccccagtgtgaaaaggatggaagcatgagggagggagggaggagggagaaaaacagaatccagccgcttaggctttgatgaactcccaggccaaaatgaggagttattgaagcaaaatagtatcttgatcattgatacttttgtctttctgtgactatatgttagctttattatgctaacagtctactttgatgtgtaagtaagtattgatatttactgttaatcttgatttttyttkwttttattctgtgtcattttgttcacctttgtttttaatgtagtttaaaggaatttgtttttttgtgtttgtttttcttgtacattatcatgactgataaatgaaaawtgaaaaactaaaa

SEQ ID NO: 231 - DNA, 359 bp, Homo sapiens
  misc_feature (236): n equals a,t,g, or c
  misc_feature (315): n equals a,t,g, or c
  misc_feature (355): n equals a,t,g, or c
actattgataaccttttctattggtcctagtgttttgctatttaagataatactgcatcaaatattcttagtgtagccatccatttacaagtgttattttcaagagcaaaatttatgcctttaaactgtgataattaaattaatactggtgagaactatcagatataccactgtgacagaacagatggcctagagacagtgatacctttaaaagttaaataattgctgagcgcggnggcttacgcctgtaatcccagcactttgggaggccgaggtgtgtggatcacgaggtcaggagttcaagaccaagcctgnccaagatggtgaaaccccgtctctactaaaaatacagggngggc

SEQ ID NO: 232 - DNA, 492 bp, Homo sapiens
  misc_feature (490): n equals a,t,g, or c
  misc_feature (491): n equals a,t,g, or c
  misc_feature (492): n equals a,t,g, or c
gaaatgctacctccagggtcttggtgagagaaagtacagctttacctgataggtgatttcccttggaatccatcagaactcgacaaagcatgattttctgagcctagtaaaatggttctgaatcaaaaccgaagtcacgctgtgctgccgatccctgtttgactctcaaaaccaaaatctgtatcaggaaaggaataatcatttagcagactgagtccaaaatgctcatttttggtttcctgtgaaaatggatttctttttgtcgctttctttttttttttttttttttttgagatggagtctcgctctgttgcccaggctggagtgcagtggtgcaagttttgactcactgcagccaccgcctcccgggttcaagcgattctcctgcttcccaatcccgagctgctgggattacaggcatgcgccaccatgctcggctaattttttgtattttcagtagagacgggttttcaccatgttggccagtggnnn

SEQ ID NO: 233 - DNA, 699 bp, Homo sapiens
  misc_feature (6): n equals a,t,g, or c
  misc_feature (14): n equals a,t,g, or c
gggtanatccctcnaccggtccggaattcccgggtcgacccacgcgtccgcaagtgctgaactctcacatcaggtcctttgctcctgttccctggaccctaatccaatatgactggcatctttatatgaagaggaagaggcaccagagggtacacacgcagagaaaaggccatgtgtggacacagtaagatgacggacatctgtaagccaaggagggaaacctcagaagaaaccagccttgcctgcaccttgatcttggaggtccagtctccagaactgtgaaaaaaatgaactggtgttgtttaaatcccccagtcgtggtattttgtcatggtggccctagaagacaatatacaacccaaaggaatattctttccactttctccctcttccactttatagttttttctccttcgtttctttctttttctcttttactttccttttcttctcttctctttcctctggtttttaattttaattttaatttttggccttcctatacctccatttgcctctccaggaagctgaattccagacaattaatcattcatctcatcagttcagcaaagcaaatgcccycaatggtttyttttgtgattcgattattatgggatcagaatgtatcttattcctctgggaaaaatgaaacataaaaatttcaaaaawaaaaaaaaaaaaaaaaaaaaaaaaaaaaaa

SEQ ID NO: 234 - DNA, 472 bp, Homo sapiens
  misc_feature (281): n equals a,t,g, or c
  misc_feature (316): n equals a,t,g, or c
ttttccttgaagctgtttggtgtktgacccagcaagggccctttgtaggacagcaggagggaggcgtcgggggccttagcagaaggggaacaatgagggcatttcatgaaccatctcaggcacttctgcatcacggaagacctggccctcccagccgtccctggggatgctcagggtgcaggcagaggctcgggaggccggactcaggggtcagaagcagggactggggcaggcgagcccggacagggaagaggggctccgatcaaagccggccgtgctgnctgccgggggcccaggtgggtacaagctysctttngctttgcacaaacctgaatcccccaccagagaggatgtgtgtgaggagccagaaacgctgaatccaattaagagagaaaaataataataacaataaatgatcttggacaagaaaaaaaaaaaaaaaaaaaaaattcctggcggtccaagggaattc

SEQ ID NO: 235 - DNA, 355 bp, Homo sapiens
  misc_feature (37): n equals a,t,g, or c
actgactatcagtggccgtctggcccaggcgatgggnggcgaactgagcgccaccagcacgccggaggttgggaagctgtttttgtttacgcttgccgttacgtgttgccacgcacccgtgccaaaaacagtcaatcaggcggtgcgtcttgacggtttacgtttgctgttaattgaagataacccgctaacccagcgaattaccattgaratgctgaaaaccagtggtgcgcagattgttgctgttggcaatgccgcgcaggctttagagacactgcaaaatagcgaaccgtttkctgccgcactggtggattttgatctgccggatatcgacggcattamgsttgcccsacaa

SEQ ID NO: 236 - DNA, 488 bp, Homo sapiens
  misc_feature (427): n equals a,t,g, or c
  misc_feature (431): n equals a,t,g, or c
  misc_feature (480): n equals a,t,g, or c
aattcggcacgaggccacgggatctcccgccctctccggcccctctgcagcccttggctcattgaccatgcggtgttgcttgtgggctacggcaaccgctctgacgttcccttttgggccatcaagaacagctggggcactgactggggtgagaagctccccctctyccccagggttactactacttgcatcgtgggtccggggcctgtggcgtgaacaccatggccagctcggcggtggtggactgaagaggggcccccagctcgggacctggtgctgatcagagtggctgctgcccagcctgacatgtgtccaggcccctccccgggaggtacagctggcagagggaaaggcaytgggtamctcaggtgagcagagggcaytgggytggggcacagccttgtttcttgacccattccacctgaantctnactgacttgtgaatgggactagaagattcggtaaggggatctgagtgantggagctt

SEQ ID NO: 237 - DNA, 57 bp, Homo sapiens
acccgtagttacctcatacgtaaggcccggcaagccaaggcgcgccgcatcgccccg

SEQ ID NO: 238 - DNA, 206 bp, Homo sapiens
  misc_feature (13): n equals a,t,g, or c
  misc_feature (201): n equals a,t,g, or c
aattcggcacagnaacaagactgcggccaacttggtagtggaaactgggcaggatggagtacagataaggagcctttctaaggagaccacccgttataatcatcccaagcccaacttgctgtatcagaagtttgtgcaaggtattagaggctgtgggtaacagaaaaaaaaaaaaaaaaaaaaaaaaaaaaaaaaaaaaanaaaaa

SEQ ID NO: 239 - DNA, 259 bp, Homo sapiens
  misc_feature (236): n equals a,t,g, or c
  misc_feature (248): n equals a,t,g, or c
aattcggcagagcttcagtggtggccaggcatggtggctcacactgtaatcccagcactttgggacggctgtggcgggcggatcacctgaggtcaggagatcgagaccatcctggctaaccccgtgaaaccccgtctctattaaaatacaaaaaaaaattagccgggcgtggtgggcatacgcctgtagtcccagcttacttcaggaggctgaggcaggagaattgcttgaaactngcgggggtggtngaggttgcagt

SEQ ID NO: 240 - DNA, 151 bp, Homo sapiens
  misc_feature (91): n equals a,t,g, or c
agcagcaacactgtcagaaggtgccctgagacggccggcttgccttcccttgcactggttggggtggaactgtcagaggccagcccggggnttagtaggcgcaaggtagaggagggatccagtggggccgtgggctgggttagggtgcctt

SEQ ID NO: 241 - DNA, 108 bp, Homo sapiens
  misc_feature (7): n equals a,t,g, or c
ctgatgnagatactgtgcaaatgtagaatggtagaaatgacaacaaaggatttagaatgtgacataaattagttgataaagcagcagcagggtttgagaggactgagt

SEQ ID NO: 242 - DNA, 343 bp, Homo sapiens
  misc_feature (85): n equals a,t,g, or c
  misc_feature (274): n equals a,t,g, or c
  misc_feature (326): n equals a,t,g, or c
ctccaggccccccgctgtgcttctcccgcttctccgtctcgcctgcgctggagaccccggggccacccgcccgggcccccgacgnccggcccgcagccccgtggagaattgattccccgaagacccgaccccgctgcamcctcagaagaggggttgagaatggaatcctctgtggatgacggcgscactgccaccaccgcagacgccgcctctggggaggcccccgaggctgggccctccccctcccactcccctaccatgtgccaaacgggangccccgggccccgccccccagccccccagatggctcccctaacccccctgancccctttggagccaaat

SEQ ID NO: 243 - DNA, 404 bp, Homo sapiens
gcggccgcccccgcgccccgggcgccgggccttagtgctggcgcgggcccgggagagcgccgagctgccgctgcccgccggctgggaggaggcgcgagactacgacggtcgcgwcttttacattgaccacaacacgcgccagacgtcgwggatcgacccccgcgaccggataacaaagccattgacctttgccgattgtgttggggacgaacttcctttaggatgggaaaccgtatatgataaacaaattggagtttattacatggaccacataaataaacttacccagattgaggatccaagaggaacagtggaggcgagacaagagcgcatgttgaaggaatatttaattgtagctcaggaggctctcaatgccaagaaagaaatctaccagattaagcagc

SEQ ID NO: 244 - DNA, 487 bp, Homo sapiens
taccgggccggaattcccgggtcgacccacgcgtccggaaattttcctaggtcagtttatatataacaaaacaggaaccaccgttcaaacatttgaactccagcatgcagtttctgaatatttattatgtgtgaaacttaatatctttagcaactggggacacccgaagtatacttgtttatatcgattcagggtccatggcacaccaggcaagcacatctagaagagttggtacagaaggccatgccacatgtccagaatattcaagaatgcttattctcttagatgataccgcacccataggaattgagaattgggagtgggaagaaaacctcaaagtggttcatacttgcctgtaaaaagtaaatgcattttactaataaaaaaatatggaagtaaattaaatatccttgccatagtttagtctttaaggatgcttcatgttgttagagcattgaaaactcattttgtatttagaagaagatag

SEQ ID NO: 245 - DNA, 734 bp, Homo sapiens
  misc_feature (433): n equals a,t,g, or c
  misc_feature (648): n equals a,t,g, or c
  misc_feature (676): n equals a,t,g, or c
  misc_feature (730): n equals a,t,g, or c
atgacagcttcatgtgtgttactgcccctgaagaagaccttccagtgggacaaaatgtggaggtggaagacaatgatcattgatgatcctgaccctgtgtaggccgaggctaatgtgtgtttgggtcttagctttcaacaaaaaaagtttaaaaagtaaataaaaaattttttaaatagaaaaaggcctatagaatagggatataaagaagaaaatatttttgtacagctgtacaattttttgtgttttaagctgtgttattacaaaagagccaaaaagttataaaattgaaaatacagttaaagtaagctgtttattattgaagaaagaaaaacattttaaaataaatttaatgttgcctgagtatccagtgttgataaagtctacagtagtgtacagtaacatcctagggccttcacatttcactcaccgntcactcactgactcagccagagcaactttcagtactgaaagccccattcgtggtaagtgccctatacatgtgtaccatttttaatcttttttatacagtatttttactgtatcttttctctttttagatgtttaaatacacaaataccgatgtgttacagttgcctacagtattgagtacagtaacaatgatgtacaggttttgtagcctatgancatagactataccatctatgtttgtgtnagtatactctgtgatgttcacacagtgaaatcacctaaccatgcatttcttcanaata

SEQ ID NO: 246 - DNA, 508 bp, Homo sapiens
gcaaaaaagtaccaggatctcaaatatcagtgctggtattttttttttttttacttaaagaaattgatatgattaaatattaagagacaatatgatccttgttggcttgtaaccctagtttttattgycttktagttattaaatagagcatctgttgagggactcttttaaaaccacagccatgaacagacgttggggctaagagacagagcagcctgcgacagtgtggacctacctgtagcagctagcaaaggcctctagcagctacagtcccttctggagtctttatttgcatgcaaaatgcaaaggagtcctggtgacctacctccaaggcagctgccctcctgaacactcccttggaaaacagtaaacatcattttggaatgtgaacaaccagagactacacaggagaaaggaaaaaaaaattctgaagatgcaaaatcttgggtggcttcaccgttcagttttttaataaaaggaacaatatacaaaaaaaaaaaaaaaaaaa

SEQ ID NO: 247 - DNA, 389 bp, Homo sapiens
  misc_feature (319): n equals a,t,g, or c
  misc_feature (376): n equals a,t,g, or c
ttaattttcatgttagacatttggattatgatactcaaggccgcagttgtctaaatgtaaatagtaccgagggaagagtagcacattccgacattctctcagtgagacttattcatcagatgggggctstkagtgggtgagatttcacacagatggatgggagtctgctggaaggaaaaattcagagcattgaaggttctgcctgtgtgagtgtttgttgggtgaatgaggggactgagtaggaaggagggcaggcaatgaggctttaaagggaagaaggtagggaaatttgaactcatctttcctagtgcttactctncagcccattccctgggtttgtgggaccttgaccccacactctttttcccagcaccantgtcttgtgtgag

SEQ ID NO: 248 - DNA, 499 bp, Homo sapiens
atctggactttttttttttttttttttttttgagacagagtctcactctgtcacccaggctggaatccagtggcactatctcagctcactgcaacctccgcctcccaggttcaagcaattctcctgcctcagcctcctgagtagctgggattacaggcacacgccaccacacgcagctaatttttgtatttttagtagagatggggtttcaccatgttggtcaggctggtctcgaactcctgaccttgtgatctgcccacctcagcctcccaaagtgctatgattacagacgtgagccaccgtgcctggcctggaattatctggactttcaaagaagatggcattattataagaagagaagattattgccgaaaagatggattgcctcactttccactttttatgtaacagtagttaaaaaacagctttttttttacttgaattacaaaaaagtttaaataaaacttgtatttatgatwcgaaaaaaaaaaaaaaaaaa

SEQ ID NO: 249 - protein, 49 aa, Homo sapiens
  misc_feature (48): Xaa equals any of the naturally occurring L-amino acids
FQHFGRLRQVNHLMSGVRDQPGHHSETPSLLKMQKLTWHWGRPFVIPXT

SEQ ID NO: 250 - protein, 46 aa, Homo sapiens
RLRFKKKKNRSPSPWQAHILADAWVDPGIPDRYLQAYQLWLYIEAP

SEQ ID NO: 251 - protein, 105 aa, Homo sapiens
NLDKEILLRKELLEKIEKETLQVEEDRAKAEAVNKRLRKQLAEFRAPQVMTYVREKILNADLEKSIRMWERKVEIAEMSLKGHRKAWNRMKITNEQLQADYLAGK

SEQ ID NO: 252 - protein, 61 aa, Homo sapiens
  misc_feature (50): Xaa equals any of the naturally occurring L-amino acids
  misc_feature (60): Xaa equals any of the naturally occurring L-amino acids
FGRAWSSAWSIVGTRFRENVCCQKADLCHLLSPQLLNHCQQCSGNQPVLXFCILGCNSGXL

SEQ ID NO: 253 - protein, 108 aa, Homo sapiens
  misc_feature (107): Xaa equals any of the naturally occurring L-amino acids
NSAELASVHSTPCSLHLFLLLPPRFFFFPWLSSSCPASVHSRVDQKLGLRITSLTEVRGKGREQPLAEQGRGTLFSKVVKKQEGGPVLSRVSHPGEHFTTALLPFNXK

SEQ ID NO: 254 - protein, 66 aa, Homo sapiens
  misc_feature (24): Xaa equals any of the naturally occurring L-amino acids
  misc_feature (33): Xaa equals any of the naturally occurring L-amino acids
  misc_feature (59): Xaa equals any of the naturally occurring L-amino acids
  misc_feature (62): Xaa equals any of the naturally occurring L-amino acids
ITSCSARYIRQSDQSFWKGMGICXNQVLTCPIXKISAIDYSLNINGGLQSHCYRRRRGXRNXGSLY

SEQ ID NO: 255 - protein, 115 aa, Homo sapiens
  misc_feature (18): Xaa equals any of the naturally occurring L-amino acids
  misc_feature (30): Xaa equals any of the naturally occurring L-amino acids
  misc_feature (74): Xaa equals any of the naturally occurring L-amino acids
  misc_feature (87): Xaa equals any of the naturally occurring L-amino acids
  misc_feature (96): Xaa equals any of the naturally occurring L-amino acids
  misc_feature (101): Xaa equals any of the naturally occurring L-amino acids
TKHSTPQAAFPHCALHMXSCCCRLHPSQWXPRQHSQTALTSSPAEGPTSGGQKILEETLALDIPEVNSTFLDLXVGWWNLPFRPFHXLRCSTPFWXVPQFXQTQIQVHGTILLKA

SEQ ID NO: 256 - protein, 44 aa, Homo sapiens
  misc_feature (14): Xaa equals any of the naturally occurring L-amino acids
  misc_feature (41): Xaa equals any of the naturally occurring L-amino acids
  misc_feature (43): Xaa equals any of the naturally occurring L-amino acids
WLMHDPAYPESLPXAPLVRYTYTEAGELLAVYDRSNYAVRXFXV

SEQ ID NO: 257 - protein, 73 aa, Homo sapiens
  misc_feature (36): Xaa equals any of the naturally occurring L-amino acids
EALWVKAWRQESEGQFQETQFINFHQHLPGPCLVLXNPALNLTSFSLSEHRMQGIQEWVNRREAGSRRPLRTR

SEQ ID NO: 258 - protein, 113 aa, Homo sapiens
  misc_feature (5): Xaa equals any of the naturally occurring L-amino acids
  misc_feature (58): Xaa equals any of the naturally occurring L-amino acids
  misc_feature (96): Xaa equals any of the naturally occurring L-amino acids
  misc_feature (102): Xaa equals any of the naturally occurring L-amino acids
GPQRXALCAGAGALPLRRGAPRALGQVQQGGLGQALGVGTALGLLSPASCSPQRVLLXTSAPAAKATNVEAIRSQGLQVHDISRKSSSRPLLSRIXYTRVSXTSDPQSLANGK

SEQ ID NO: 259 - protein, 41 aa, Homo sapiens
MEGMLCFSVCPLFLFLKPGRQEWKLCLKKKKKKFSEIHLYI

SEQ ID NO: 260 - protein, 94 aa, Homo sapiens
LGWNPCPWCHHCSFITVGSSESDFMAQCLGLPKCWNCRHEPARLAYILIYIQSRLCSKTIGLEDRLVTQFMMGFTKGLVLRFEMAFVIGLVMGS

SEQ ID NO: 261 - protein, 22 aa, Homo sapiens
LVLNTFLRYYAKENKNCFIEVS

SEQ ID NO: 262 - protein, 128 aa, Homo sapiens
ITLLLSVSIFTLSPETGFPAWPSVPIPLPMTAQWLHRAWSSKEDGLKMSDLCEEPSCSKSSHPSGPDLWFSLIYCSYNPEALDLFGGSQKGISCLPINNQRYVYICLSINMYGLFICSFFQQMQLSFY

SEQ ID NO: 263 - protein, 67 aa, Homo sapiens
  misc_feature (9): Xaa equals any of the naturally occurring L-amino acids
  misc_feature (63): Xaa equals any of the naturally occurring L-amino acids
LNFPRSLIXLLVVVLLFIFLIICMHEHPLSISHSHVFIQSFVYSYPLHGLMIHTLCTFLLADXPFSY

SEQ ID NO: 264 - protein, 92 aa, Homo sapiens
FTTIHFINQNCIACDSFGFQSSQKYYFVACTVCLEATNYILNMVLLCLTQRETLYRMYVMGWGNRVFTALLGDGTQSMSQNISVLNYPTKEI

SEQ ID NO: 265 - protein, 91 aa, Homo sapiens
GSVPATPASAFCGARTTSVSVSARRHGAVGFELMLFLSTLLFQCFIELVSTAEKPRLKEGLIHEQDTVAQFGPQKEPVRQQIHRMFLLRVK

SEQ ID NO: 266 - protein, 81 aa, Homo sapiens
  misc_feature (3): Xaa equals any of the naturally occurring L-amino acids
  misc_feature (7): Xaa equals any of the naturally occurring L-amino acids
  misc_feature (58): Xaa equals any of the naturally occurring L-amino acids
PLXQSFXVILSVLGHRKQTLFFSCPSFTCPRQDSNLSWTFQWLVLRPFPERSHPIPRXKECLRYKAFIKTQADRVQGALGY

SEQ ID NO: 267 - protein, 71 aa, Homo sapiens
KNPPVFLNDAPPTPPQPKAKASWTSSYAKEQACLRPLEESAPAWRHFLARWETVQSPWPTGSNSSLCASYR

SEQ ID NO: 268 - protein, 61 aa, Homo sapiens
  misc_feature (26): Xaa equals any of the naturally occurring L-amino acids
  misc_feature (58): Xaa equals any of the naturally occurring L-amino acids
QAILSLESEQVPLMSAHWCLKNTFKXGAVAGNDWLIWDITRSRYFLDMFVYYTPKKGXNCC

SEQ ID NO: 269 - protein, 55 aa, Homo sapiens
NYKNSQAWWWVPVIPLGRLSQENCLNPEVKIGVSQDCAVALQPGRQSETPYKKKK

SEQ ID NO: 270 - protein, 48 aa, Homo sapiens
  misc_feature (19): Xaa equals any of the naturally occurring L-amino acids
KAMGKIFLCENLYFVSLPXTVQVPAFHSEVSYSMTLFIMTSVFVYSFE

SEQ ID NO: 271 - protein, 94 aa, Homo sapiens
AASEVCRVMSFVKFGKFSAIASLIFQPHTFSHLPWNPYDTDVRSLFIVPQVPKALSILFSHAFSIHFSEWEISVLSSSSLVLSSVLSILPVIPL

SEQ ID NO: 272 - protein, 55 aa, Homo sapiens
  misc_feature (28): Xaa equals any of the naturally occurring L-amino acids
  misc_feature (30): Xaa equals any of the naturally occurring L-amino acids
  misc_feature (42): Xaa equals any of the naturally occurring L-amino acids
CYRLFKKVLTLYGLKIQICLPSIILSLXLXTEGKWKHITYLXQLLVSDTQHLWVI

SEQ ID NO: 273 - protein, 59 aa, Homo sapiens
IQLTSYWIWNVIRKKYAQRTVTYPHIDVPTQPHFIASPDPFQIQLNYFGPQSPRLPGTC

SEQ ID NO: 274 - protein, 91 aa, Homo sapiens
  misc_feature (55): Xaa equals any of the naturally occurring L-amino acids
  misc_feature (56): Xaa equals any of the naturally occurring L-amino acids
  misc_feature (62): Xaa equals any of the naturally occurring L-amino acids
TFKKICQSYVKHFRGLFCFLPALSPIHTTSPMSTFKEKPSHIVSLKGSFIINVTXXVHRYIXCLFKMTRDQICQIFLSDFYQGHPRYVSSV

SEQ ID NO: 275 - protein, 82 aa, Homo sapiens
  misc_feature (79): Xaa equals any of the naturally occurring L-amino acids
PPSTRLASSNLIFLDCRSWSPSGLSCHWEGFEGRPGLGVPAIAWGPGALRVPRGGLSQVDHVLKLLGLAFSAGWTHHLXFVI

SEQ ID NO: 276 - protein, 80 aa, Homo sapiens
  misc_feature (1): Xaa equals any of the naturally occurring L-amino acids
XEQKLELHRGGGRSRTSGSPGLQEFGTRSDAVISQRTPRIARSRQKLVGARKDPPLEPSQGAWLCQRLDFGLLASRTEKE

SEQ ID NO: 277 - protein, 92 aa, Homo sapiens
  misc_feature (27): Xaa equals any of the naturally occurring L-amino acids
  misc_feature (50): Xaa equals any of the naturally occurring L-amino acids
  misc_feature (79): Xaa equals any of the naturally occurring L-amino acids
  misc_feature (85): Xaa equals any of the naturally occurring L-amino acids
  misc_feature (92): Xaa equals any of the naturally occurring L-amino acids
LGPQMCTTMLFCRDASFVEMGSFCIGXDGLEHLASSNPPSLASQSVMIIXVSHCAQPSFETGLLLESYSACSLPELPHXSKLGRXLPPTGFX

SEQ ID NO: 278 - protein, 47 aa, Homo sapiens
LVPNRHEFGTSSGVRLWAASPWATSGPGIYQLVSASSSRVQGSGGDP

SEQ ID NO: 279 - protein, 65 aa, Homo sapiens
  misc_feature (41): Xaa equals any of the naturally occurring L-amino acids
PFILFVWMHSPSLRIGIKFYQGFLLLPALPLFPPDFLSLLXLFWSVFQVRYFPTISSEPWLSIHI

SEQ ID NO: 280 - protein, 54 aa, Homo sapiens
KFISCLYKIHNDSCQLAGCSLPSGNPGTQALFILWLSHLTHVASSTALLLSAQS

SEQ ID NO: 281 - protein, 41 aa, Homo sapiens
  misc_feature (11): Xaa equals any of the naturally occurring L-amino acids
  misc_feature (40): Xaa equals any of the naturally occurring L-amino acids
KGSNQQCPYSXIKNLNFNISSDFCHRNLNQVFWYSIFKFXE

SEQ ID NO: 282 - protein, 126 aa, Homo sapiens
  misc_feature (103): Xaa equals any of the naturally occurring L-amino acids
  misc_feature (117): Xaa equals any of the naturally occurring L-amino acids
  misc_feature (123): Xaa equals any of the naturally occurring L-amino acids
LCCPGWSALAQSFTAHCSLHLLGSSDPPTPASRVAGKTAAHHHTQLNFLIFSRDGVSLYYLGFLTWKIELLELLGSSDPPLGLPKRWDYRCEPPDLGLKSTYXFSISFLKVRRVKTXISIKSXKLS

SEQ ID NO: 283 - protein, 48 aa, Homo sapiens
  misc_feature (46): Xaa equals any of the naturally occurring L-amino acids
  misc_feature (47): Xaa equals any of the naturally occurring L-amino acids
HSLHLAGLCRMTQIWCPYCPMWFPFLFFFPHFDSAHSLVVCWERVXXK

SEQ ID NO: 284 - protein, 49 aa, Homo sapiens
  misc_feature (11): Xaa equals any of the naturally occurring L-amino acids
  misc_feature (43): Xaa equals any of the naturally occurring L-amino acids
VSLFEVYSLVXFSIFRVMQPLPLPNFRTFSSFFSFLHIKIFKXLFNDNI

SEQ ID NO: 285 - protein, 53 aa, Homo sapiens
GQQSFLSRVERETHVLPRPCSVCSVGRVVGTHLAQIDASLAVGEGPVRFVYGS

SEQ ID NO: 286 - protein, 67 aa, Homo sapiens
LKPIVLVAQLPVQKDLSSFFSFMACMLQLNKGERALFRSSIGMSKIPARLNWSSEFCLMSMKHNKGF

SEQ ID NO: 287 - protein, 89 aa, Homo sapiens
  misc_feature (7): Xaa equals any of the naturally occurring L-amino acids
  misc_feature (78): Xaa equals any of the naturally occurring L-amino acids
  misc_feature (81): Xaa equals any of the naturally occurring L-amino acids
NVLFCMXTSCTPMYDVLRRVHHHSWDIPAKNAYPQSDHEETLGKPQFGTACKIIGLYSSKVPRSRKTKTEELSQVKGXQEXTTTRCGGI

SEQ ID NO: 288 - protein, 50 aa, Homo sapiens
  misc_feature (6): Xaa equals any of the naturally occurring L-amino acids
  misc_feature (16): Xaa equals any of the naturally occurring L-amino acids
  misc_feature (24): Xaa equals any of the naturally occurring L-amino acids
  misc_feature (45): Xaa equals any of the naturally occurring L-amino acids
  misc_feature (46): Xaa equals any of the naturally occurring L-amino acids
LEGILXIIKSNFSTMXLKSKHPHXLNTSSDKKLTILQSIHRVKAXXYLSS

SEQ ID NO: 289 - protein, 42 aa, Homo sapiens
  misc_feature (27): Xaa equals any of the naturally occurring L-amino acids
TTSQDKQHSENSSLLPLIFNLEILWLXMVSFFGALMETLTQL

SEQ ID NO: 290 - protein, 78 aa, Homo sapiens
  misc_feature (17): Xaa equals any of the naturally occurring L-amino acids
  misc_feature (22): Xaa equals any of the naturally occurring L-amino acids
  misc_feature (30): Xaa equals any of the naturally occurring L-amino acids
  misc_feature (43): Xaa equals any of the naturally occurring L-amino acids
  misc_feature (44): Xaa equals any of the naturally occurring L-amino acids
  misc_feature (48): Xaa equals any of the naturally occurring L-amino acids
  misc_feature (50): Xaa equals any of the naturally occurring L-amino acids
  misc_feature (57): Xaa equals any of the naturally occurring L-amino acids
  misc_feature (74): Xaa equals any of the naturally occurring L-amino acids
ELHYILCKLFLFNLCLXNKWTXFKYYWRLXNMHTKFSFSLGIXXIGRXSXSLHLVVXETNISNSHFRGNRWKGXARGG

SEQ ID NO: 291 - protein, 92 aa, Homo sapiens
  misc_feature (39): Xaa equals any of the naturally occurring L-amino acids
FLVEMGFHRHHVGQPGLKLLTSGDPPALASQSAGITGMXHRTWPHLIYIIKQVQALPDFILTFCFLLLHYLSPWVGSSPLSLFYSFLSFLPH

SEQ ID NO: 292 - protein, 55 aa, Homo sapiens
CSTCKCVAYAIMFIHSSVHTVFIRSDISPHFCLTPVSQKSDGISYSLQFYLADIY

SEQ ID NO: 293 - protein, 69 aa, Homo sapiens
  misc_feature (43): Xaa equals any of the naturally occurring L-amino acids
  misc_feature (60): Xaa equals any of the naturally occurring L-amino acids
  misc_feature (61): Xaa equals any of the naturally occurring L-amino acids
LSIMHELLLWFRMISVSAVLSSPFCFHHIGISLLINNCGKEKXNALIEDCINQYTTFHWXXSLVAFLKR

SEQ ID NO: 294 - protein, 46 aa, Homo sapiens [sequence omitted]

SEQ ID NO: 295 - protein, 132 aa, Homo sapiens
  misc_feature (75): Xaa equals any of the naturally occurring L-amino acids
  misc_feature (94): Xaa equals any of the naturally occurring L-amino acids
  misc_feature (102): Xaa equals any of the naturally occurring L-amino acids
  misc_feature (106): Xaa equals any of the naturally occurring L-amino acids
  misc_feature (112): Xaa equals any of the naturally occurring L-amino acids
  misc_feature (121): Xaa equals any of the naturally occurring L-amino acids
  misc_feature (123): Xaa equals any of the naturally occurring L-amino acids
SYFPPFRTPLVRNCPCERPYLRGGEQRPPCWRRRTTGIPRTRGAGYLSIFCLFSHCFISVWTHACLLDASGYKAXLFYFPGVVLLQLCHTQLDXHTLLAYEXPVYXGRKLEXKRSGDAATXLXLLLLLAGYS

SEQ ID NO: 296 - protein, 81 aa, Homo sapiens
  misc_feature (46): Xaa equals any of the naturally occurring L-amino acids
  misc_feature (53): Xaa equals any of the naturally occurring L-amino acids
  misc_feature (55): Xaa equals any of the naturally occurring L-amino acids
EKRRKSKPVYLVYLFFLRRKKFIFTRCFKLGFLTRNQKTTGGNIRXRTMSLFXYXFSLPTPTMDNQLRQPTRKHLQPDGYK

SEQ ID NO: 297 - protein, 68 aa, Homo sapiens
  misc_feature (37): Xaa equals any of the naturally occurring L-amino acids
VILRSHTIYCIWNLQSNEDALEMASYLSDLLEYFNIXLLICFLRGTMTWVESVAGCFHFQRFDFGQVA

SEQ ID NO: 298 - protein, 82 aa, Homo sapiens
  misc_feature (42): Xaa equals any of the naturally occurring L-amino acids
  misc_feature (75): Xaa equals any of the naturally occurring L-amino acids
  misc_feature (78): Xaa equals any of the naturally occurring L-amino acids
  misc_feature (82): Xaa equals any of the naturally occurring L-amino acids
TVHFFPDSLYGTASLFASEGQGLQDLLLWSPRNHIQTSQQGXMAFQFAYDPLRQGSFSQYTLCFSQGDLPLSSLXVLXVPDX

SEQ ID NO: 299 - protein, 53 aa, Homo sapiens
  misc_feature (40): Xaa equals any of the naturally occurring L-amino acids
AAYSDIQHKALPSICPVILACLPHSIRQRPVAAQKAQYAXLILKFKFAFEYAV

SEQ ID NO: 300 - protein, 76 aa, Homo sapiens
  misc_feature (74): Xaa equals any of the naturally occurring L-amino acids
SSSPVPSQSIKTGRGGCFFRYPKSQQKIMRHMKKQRNMAQLMEQNKSPEFDPRETEINELSDKEFKMIILKKLXML

SEQ ID NO: 301 - protein, 63 aa, Homo sapiens
  misc_feature (10): Xaa equals any of the naturally occurring L-amino acids
  misc_feature (18): Xaa equals any of the naturally occurring L-amino acids
  misc_feature (29): Xaa equals any of the naturally occurring L-amino acids
  misc_feature (46): Xaa equals any of the naturally occurring L-amino acids
  misc_feature (50): Xaa equals any of the naturally occurring L-amino acids
  misc_feature (58): Xaa equals any of the naturally occurring L-amino acids
SQQSGFRAMXFNPKVNTXLIIISLIPPHXGLDIPGTLLNHFYLNSXKFLXPTLLRALXVAGFG

SEQ ID NO: 302 - protein, 72 aa, Homo sapiens
  misc_feature (28): Xaa equals any of the naturally occurring L-amino acids
  misc_feature (45): Xaa equals any of the naturally occurring L-amino acids
TKTKENQHLPPTPPTSTPTLIHGGNSRXIFCFNLKIYNIKGNCVXLFYCLKSHFKYSLEQMIFSKYSLEQRK

SEQ ID NO: 303 - protein, 62 aa, Homo sapiens
  misc_feature (23): Xaa equals any of the naturally occurring L-amino acids
  misc_feature (54): Xaa equals any of the naturally occurring L-amino acids
  misc_feature (61): Xaa equals any of the naturally occurring L-amino acids
NTCLEKCIHIIWIVKRWLILNLXISFLHGKLFLTRCTVKHLQDEKFGILHQENXVSLDFLXI

SEQ ID NO: 304 - protein, 46 aa, Homo sapiens
LGEAALSRVVTDVPDVCLPVYRCNFSNLKAGYLRISCMCIIFLLCN

SEQ ID NO: 305 - protein, 47 aa, Homo sapiens
  misc_feature (19): Xaa equals any of the naturally occurring L-amino acids
TTAVTLHQLFAQLLFDTAXFAASSSPDLASKASTKSSHIPCFSLPTC

SEQ ID NO: 306 - protein, 77 aa, Homo sapiens
DATILKFLFPRVASFTALVVSLEFCPTASKFSDHISEMPSDLRLIPPCMGPLSRPSQAVGEMSVCFSLRVSSTVSSI

SEQ ID NO: 307 - protein, 100 aa, Homo sapiens
  misc_feature (97): Xaa equals any of the naturally occurring L-amino acids
SESFFLGLSVISGTCYHPRLSTLGNVISRRTLAQPMPSVSRLNMFRGRGTARPASPSHTWGHVFSGTQTPKAHGKCPCKLSPDFLIFLLGPQTLNTXMRA

SEQ ID NO: 308 - protein, 57 aa, Homo sapiens
  misc_feature (18): Xaa equals any of the naturally occurring L-amino acids
VIEQIVHFYQDFPLPLPXSVFSLFLARRKHLGHRPFIHNGVYFPKQISLDYFNSRAI

SEQ ID NO: 309 - protein, 44 aa, Homo sapiens
LTFHMIIFSTISEIQELKESQKSSTLFLWGSRRPRKLFYLELYN

SEQ ID NO: 310 - protein, 83 aa, Homo sapiens
  misc_feature (80): Xaa equals any of the naturally occurring L-amino acids
HYELSGFKQHKFIFLQFWKPKIKISTGLFFLKSSRKSLFPCLFQFLEATYISWLMAPYSYHPILLLKSLHLLGKSASLLXESL

SEQ ID NO: 311 - protein, 100 aa, Homo sapiens
VFPSPHFSSEVTEAQSDKETCPRPHTGWCSSRDLNPRSLTLEPKLLTMTSYLIHCFTGETDHLTDILSVSNLTTLSPVVCTEPGAVLRNGDLAVNKIESP

SEQ ID NO: 312 - protein, 47 aa, Homo sapiens
GFTHLHSPGREREMKTVRGETPQKCNSTPTPSLHIYQEMEFIISFLF

SEQ ID NO: 313 - protein, 53 aa, Homo sapiens
GILLQLYLSYSHLRAPTPLVQPSFHQSFLEPCQFFVSLPCLLSLPESRHSCVP

SEQ ID NO: 314 - protein, 76 aa, Homo sapiens
  misc_feature (12): Xaa equals any of the naturally occurring L-amino acids
RHVAVHLLYMWXTKERWSCHVEHAWPPSLFLLAQLQAFTHASFQLAYLCLQLNFTGCSLVEKKLFWGCFLVKGKPY

SEQ ID NO: 315 - protein, 74 aa, Homo sapiens
  misc_feature (55): Xaa equals any of the naturally occurring L-amino acids
  misc_feature (56): Xaa equals any of the naturally occurring L-amino acids
TKSASRVIPKHQMLSNTVIPIIIFIIFLFVSNYKTSTCLFWTNWKVQTNRNMKTXXIIVILRTFFSPRFSTRLM

SEQ ID NO: 316 - protein, 63 aa, Homo sapiens
  misc_feature (48): Xaa equals any of the naturally occurring L-amino acids
  misc_feature (60): Xaa equals any of the naturally occurring L-amino acids
  misc_feature (62): Xaa equals any of the naturally occurring L-amino acids
  misc_feature (63): Xaa equals any of the naturally occurring L-amino acids
YSKRRNSGRDYNSCLGNWSQDCTTASQPGRQSKQDSLRKKKKPKNRIXMTFLNFPYSQVXPXX

SEQ ID NO: 317 - protein, 48 aa, Homo sapiens
TPSEHNILKCIRGRVWWLTPVIPALWEAKVGGSPEVRSLRPAWPISWA

SEQ ID NO: 318 - protein, 58 aa, Homo sapiens
  misc_feature (51): Xaa equals any of the naturally occurring L-amino acids
  misc_feature (52): Xaa equals any of the naturally occurring L-amino acids
  misc_feature (53): Xaa equals any of the naturally occurring L-amino acids
CLQQCIVIGKQITDFLAFICVITSPPSATREVFQNFPCNYIKLARASQHLXXXNLSGR

SEQ ID NO: 319 - protein, 65 aa, Homo sapiens
  misc_feature (27): Xaa equals any of the naturally occurring L-amino acids
  misc_feature (38): Xaa equals any of the naturally occurring L-amino acids
  misc_feature (43): Xaa equals any of the naturally occurring L-amino acids
  misc_feature (50): Xaa equals any of the naturally occurring L-amino acids
QICRPCFRHIPIHIHVCIHIHVHIYIXIPIYIHMYYCXCLYMXLILSMRXSLMLTYVFLRAFSTS

SEQ ID NO: 320 - protein, 43 aa, Homo sapiens
  misc_feature (33): Xaa equals any of the naturally occurring L-amino acids
  misc_feature (38): Xaa equals any of the naturally occurring L-amino acids
TKSYRSTSIFIGFMEMIWSPSHERVCLKKKALXFMNLXVSFKL

SEQ ID NO: 321 - protein, 103 aa, Homo sapiens
EQRRPHWVFTAAFKQDDSQPPSPWLAASRDSETLQANGLSILLLLSVFWCFVNPSGNDPDAPCPSKGIGTCHCAPKSLSSWPWLFSCMGSCVSRYQVVAPFQP

SEQ ID NO: 322 - protein, 25 aa, Homo sapiens
  misc_feature (24): Xaa equals any of the naturally occurring L-amino acids
MPSSLCVVLKHDILSANKKQYFVXI

SEQ ID NO: 323 - protein, 78 aa, Homo sapiens
  misc_feature (8): Xaa equals any of the naturally occurring L-amino acids
  misc_feature (62): Xaa equals any of the naturally occurring L-amino acids
  misc_feature (75): Xaa equals any of the naturally occurring L-amino acids
  misc_feature (76): Xaa equals any of the naturally occurring L-amino acids
SVGWIMGXFNLIVPFEQFEFWLLWACTIFTIKNKGFLVYVHYLYFFLGFFPEFSCTLVWCDXWELNGIIMLLLWXXIG

SEQ ID NO: 324 - protein, 61 aa, Homo sapiens
GGPELSLHFLLPCGVLGLNIYHEMPWPCIFFLLLDNRILNCFDLVIKVWETSLHIFSFNLY

SEQ ID NO: 325 - protein, 49 aa, Homo sapiens
IYSRVHIQVSELVFMMCGISEVICHQLLLVLSFSHLCHPSDFDGPPCLA

SEQ ID NO: 326 - protein, 45 aa, Homo sapiens
  misc_feature (9): Xaa equals any of the naturally occurring L-amino acids
  misc_feature (13): Xaa equals any of the naturally occurring L-amino acids
IIYQWFISXKKVXISQMPVRFFSDLQVDHASLELLMLDGSSFQKH

SEQ ID NO: 327 - protein, 44 aa, Homo sapiens
  misc_feature (37): Xaa equals any of the naturally occurring L-amino acids
  misc_feature (39): Xaa equals any of the naturally occurring L-amino acids
SAGLFQVFEANRRCNLNHSSQKIALSKYTILILKLGXGXPGSNC

SEQ ID NO: 328 - protein, 94 aa, Homo sapiens
TSMINSMCFTQSIRLLFRLLGCFGNFDGAFWRVAWEAKKELRAITALTKTIEQQEVQCSPLASPLLYSFNTGEVCELWYTLNFQLRGHWPFSLS

SEQ ID NO: 329 - protein, 49 aa, Homo sapiens
  misc_feature (46): Xaa equals any of the naturally occurring L-amino acids
ASVRGGAARNNPVRPQPGRGGGRCGSRTQTAAARASRLPPEPGGPXPGP

SEQ ID NO: 330 - protein, 86 aa, Homo sapiens
  misc_feature (80): Xaa equals any of the naturally occurring L-amino acids
REQKLELHRGGGRSRTSGSPGLQEFGTSRAVEVFKGLYSPYKYSCAQKSMTFNSKWPLTFKKPCGYPSADLGEVLAIICXFIRCHH

SEQ ID NO: 331 - protein, 50 aa, Homo sapiens
REQKLELHRGGGRSRTSGSPGLQEFGTSKEEERNIIIIIENAWGQLHWKT

SEQ ID NO: 332 - protein, 51 aa, Homo sapiens
  misc_feature (15): Xaa equals any of the naturally occurring L-amino acids
RSRSQVSHLLWTELXPPDNSYIETLTPNVTEFGDGVSKDRIKVKGDHKVGG

SEQ ID NO: 333 - protein, 58 aa, Homo sapiens
  misc_feature (24): Xaa equals any of the naturally occurring L-amino acids
  misc_feature (41): Xaa equals any of the naturally occurring L-amino acids
  misc_feature (42): Xaa equals any of the naturally occurring L-amino acids
  misc_feature (43): Xaa equals any of the naturally occurring L-amino acids
  misc_feature (57): Xaa equals any of the naturally occurring L-amino acids
KALNKFQLKLIQFQLSFPITGDAXKGKKKNWVGYLILGSYXXXSKIIKVSPDDAVLXT

SEQ ID NO: 334 - protein, 89 aa, Homo sapiens
  misc_feature (62): Xaa equals any of the naturally occurring L-amino acids
EAISTYLHLDRVTGDQHTPPSPQQQEESTHTFISTGGRGISTHLHLHRGTGARLPTPLGDTXWACVKSHGSKLWSLSIGTALYYLSWKI

SEQ ID NO: 335 - protein, 117 aa, Homo sapiens
  misc_feature (52): Xaa equals any of the naturally occurring L-amino acids
QSGAHEPDTQTATEEILPRDPSKVGSGPTHGPPPSQVHPYQTTGYSPYEILXSQPPPIIGQIKGDLRELRDLTLRKQMQGLGIAMQDVYGWVRERMPITWQTQHTPLNPGTLFGSRN

SEQ ID NO: 336 - protein, 101 aa, Homo sapiens
LVPNSARASASLVAGITGMCHHAWLIFVFLVEMGFLHVGQAGLKLPTSGDLPASASQSAGITGVSHRAGLNSIFLSTEFGFTPRKYFAQVSKHWTHLVPLR

SEQ ID NO: 337 - protein, 78 aa, Homo sapiens
  misc_feature (53): Xaa equals any of the naturally occurring L-amino acids
  misc_feature (55): Xaa equals any of the naturally occurring L-amino acids
  misc_feature (58): Xaa equals any of the naturally occurring L-amino acids
  misc_feature (64): Xaa equals any of the naturally occurring L-amino acids
  misc_feature (71): Xaa equals any of the naturally occurring L-amino acids
TLAYNYWFKSLFAIHLGMFLGMELLGWFCNSLWLASSGTAILVFTEPAIIYIXTXNGXHVNFSXSLATLAXFFLFYPT

SEQ ID NO: 338 - protein, 54 aa, Homo sapiens
  misc_feature (38): Xaa equals any of the naturally occurring L-amino acids
  misc_feature (40): Xaa equals any of the naturally occurring L-amino acids
NLHLCPQNESSLTGLVNQRQLQCSGGWVWVYMWEWTPXRXVEVPSPFPLACKYL

SEQ ID NO: 339 - protein, 78 aa, Homo sapiens
  misc_feature (47): Xaa equals any of the naturally occurring L-amino acids
  misc_feature (65): Xaa equals any of the naturally occurring L-amino acids
  misc_feature (71): Xaa equals any of the naturally occurring L-amino acids
SSEPQVPFPLTRGCDALIQPLCPVWELFPTVKPVYCPSLDHVVGADXFTTRSAIFLWLQCPGFHXKACLPXPYFGWPN

SEQ ID NO: 340 - protein, 112 aa, Homo sapiens
  misc_feature (100): Xaa equals any of the naturally occurring L-amino acids
  misc_feature (101): Xaa equals any of the naturally occurring L-amino acids
SKPPPALPWSLLIGLPASILVLSREIFNKKQVKITSEKMTTYKRHNFLTEYQIVHNGEKVYECKECRKTFIRAQHLVNTLRIHTGEKPYKCKECGRPLDXXHILFDITNFTP

SEQ ID NO: 341 - protein, 39 aa, Homo sapiens
  misc_feature (16): Xaa equals any of the naturally occurring L-amino acids
  misc_feature (27): Xaa equals any of the naturally occurring L-amino acids
  misc_feature (29): Xaa equals any of the naturally occurring L-amino acids
KTMFISLYNPEMIILXFTVFAHVNILXIXKIGLFILKKF

SEQ ID NO: 342 - protein, 43 aa, Homo sapiens
VLIINPSAFAQNGRVSLSLPPLNHGAHFCSLLINVLCGHFFSE

SEQ ID NO: 343 - protein, 77 aa, Homo sapiens
  misc_feature (60): Xaa equals any of the naturally occurring L-amino acids
  misc_feature (61): Xaa equals any of the naturally occurring L-amino acids
  misc_feature (64): Xaa equals any of the naturally occurring L-amino acids
VKNRRWKINSVQNTRWKRAAERMPKSRKVQRGQGTSSDTELDLALLGICIHSARTIPPLXXGPXLNVFWVLAANLGL

SEQ ID NO: 344 - protein, 91 aa, Homo sapiens
VLQSCTAFIERYGIVDGIYRLSGVASNIQRLRHEFDSEHVPDLTKERMFRTSILWVPYVSCTSGNSQTLCLPTSCMRNFLMQFQQQQINKG

SEQ ID NO: 345 - protein, 50 aa, Homo sapiens
  misc_feature (33): Xaa equals any of the naturally occurring L-amino acids
KVPCEIRSSRLIPHCPFRPIMNSDQFHLRIVHXFFVTALTSWQMLRYVLR

SEQ ID NO: 346 - protein, 63 aa, Homo sapiens
SLKGNQINYIADKRKCIHCYNLLQWHIKFCHIFYITHIFVFVVQLVFDGLLFHIPNLWVSSFY

SEQ ID NO: 347 - protein, 35 aa, Homo sapiens
  misc_feature (21): Xaa equals any of the naturally occurring L-amino acids
  misc_feature (29): Xaa equals any of the naturally occurring L-amino acids
  misc_feature (33): Xaa equals any of the naturally occurring L-amino acids
YVFKSNFFVCILHPFSLEVIXVAALNNTXHLKXLI

SEQ ID NO: 348 - protein, 40 aa, Homo sapiens
  misc_feature (27): Xaa equals any of the naturally occurring L-amino acids
  misc_feature (36): Xaa equals any of the naturally occurring L-amino acids
RGSFEEELLLSTFPSLFNFYNFSFLNXFSMFWLNCXTWTF

SEQ ID NO: 349 - protein, 55 aa, Homo sapiens
  misc_feature (22): Xaa equals any of the naturally occurring L-amino acids
  misc_feature (23): Xaa equals any of the naturally occurring L-amino acids
  misc_feature (49): Xaa equals any of the naturally occurring L-amino acids
MVSTKTLKEWGTWLMNSFRQIXXLYKLITCQPSIKKSQDSEAVPAMGRXRHLSHH

SEQ ID NO: 350 - protein, 39 aa, Homo sapiens
  misc_feature (8): Xaa equals any of the naturally occurring L-amino acids
  misc_feature (31): Xaa equals any of the naturally occurring L-amino acids
DDFLNKIXDTKILNEIQKKKRKEKIDKFPSXKIKTDNNK

SEQ ID NO: 351 - protein, 113 aa, Homo sapiens
LGGHSPPVLCQLLHSISLSRDKVQALFHFTVFGEILTHSPGICACPSASPVGHSVDSAPGSRSSPLEAPRIPVSTGLVLGFYPSPFWPAPAWNCLERHGMGKDRWNPDHNRSF

SEQ ID NO: 352 - protein, 65 aa, Homo sapiens
DRLSGREDCREAGTQGHRPKLLSVGEICHFTFYCKQQDKTGSHLHFWNFPQVNIQLHRLQVLLHK

SEQ ID NO: 353 - protein, 65 aa, Homo sapiens
  misc_feature (55): Xaa equals any of the naturally occurring L-amino acids
SAKPLGNPHLRWLELSLCSASSFLTLWHIDSKYLISLNSEVVSIKWKLQALGFFXLAFGLENGYR

SEQ ID NO: 354 - protein, 79 aa, Homo sapiens
  misc_feature (74): Xaa equals any of the naturally occurring L-amino acids
  misc_feature (75): Xaa equals any of the naturally occurring L-amino acids
TRSLSAKHLPSSLLHPRKLHYHLLSSQTKSVSVIFPHIPHRHIIKQVGFMFDVYPLWGHYPLPPLLPLSLAKAXXIIVS

SEQ ID NO: 355 - protein, 34 aa, Homo sapiens
SYDFMLPIIQYHQALFYSCNIDKTVSISFKPLQN

SEQ ID NO: 356 - protein, 59 aa, Homo sapiens
  misc_feature (2): Xaa equals any of the naturally occurring L-amino acids
  misc_feature (12): Xaa equals any of the naturally occurring L-amino acids
  misc_feature (58): Xaa equals any of the naturally occurring L-amino acids
WXFQLTVLYQDXAHCKSKEHPSLMGYIRMRIMHRWSSAYDGIMSSKDTVSWKHLKPKXI

SEQ ID NO: 357 - protein, 56 aa, Homo sapiens
KNLKSSYFCSFNKHFFCSVLRFLLDMKWILPSFLRSFHSDIFLFILYPYAGIVYSF

SEQ ID NO: 358 - protein, 82 aa, Homo sapiens
  misc_feature (27): Xaa equals any of the naturally occurring L-amino acids
  misc_feature (68): Xaa equals any of the naturally occurring L-amino acids
  misc_feature (79): Xaa equals any of the naturally occurring L-amino acids
TFQIKAPKVPLVFSFQNSFSLSINIWXTCKNVLTCVGMKLRLSVIYSSQKEGSEIIAYFFLIFSFFLXWRYRINPHPFXKYK

SEQ ID NO: 359 - protein, 118 aa, Homo sapiens
KSLQFHNLKSADRSELIKTTENIDVSMDVKPSWTTRDVALTVHRAFRMIGLFSHGFLAGCAVWNIVVIYVLAGDQLSNLSNLLQQYKTLAYPFQSLLYLLLALSTISAFDRIDFAKYQ

SEQ ID NO: 360 - protein, 43 aa, Homo sapiens
IGLSCSAKSSQYNSCCRLQLFCLSYISFGPLYLSYKIETPVRC

SEQ ID NO: 361 - protein, 55 aa, Homo sapiens
  misc_feature (45): Xaa equals any of the naturally occurring L-amino acids
PFSPVSSPSGGQKVSGRMNHYLQNNSLCRKREEGVWWGISSYAMXSKIQTKFLET

SEQ ID NO: 362 - protein, 63 aa, Homo sapiens
  misc_feature (51): Xaa equals any of the naturally occurring L-amino acids
  misc_feature (63): Xaa equals any of the naturally occurring L-amino acids
SLERLKLCVQMHSLPLRVELLCLYLVFRQKCTSICYNHKRFFVCLFVLKKXKIWSKIAVTITX

SEQ ID NO: 363 - protein, 54 aa, Homo sapiens
FLHIWAAWTRRKNLQVWPLYKHVLQVLFDFSKVFLALDPLCLREVGNCSLTASL

SEQ ID NO: 364 - protein, 42 aa, Homo sapiens
FCTNLIHSFKVSSHKYLLIIKENRVTLHGRSDRYSYFSERSN

SEQ ID NO: 365 - protein, 60 aa, Homo sapiens
EGVERMGVTHWAGMAQLQHLAMTSQLLGTGQEECGLSANTGVDLEMKVWPLEAVTSPLLF

SEQ ID NO: 366 - protein, 54 aa, Homo sapiens
  misc_feature (46): Xaa equals any of the naturally occurring L-amino acids
  misc_feature (47): Xaa equals any of the naturally occurring L-amino acids
KNTFSYLFQYCSQILKYKFFFSMAWSRLTATSASRLQVILLPQPPXXWDHVAPA

SEQ ID NO: 367 - protein, 74 aa, Homo sapiens
  misc_feature (48): Xaa equals any of the naturally occurring L-amino acids
  misc_feature (50): Xaa equals any of the naturally occurring L-amino acids
DKMSGTVHQIPQGDRQMRPPKPKRRKISDNRDYSTNAQCLLKEHAQMXLXIGIDIATVISIFRLWQIATTTTGC

SEQ ID NO: 368 - protein, 96 aa, Homo sapiens
HYLSVKSRLLNTANKGLRNPAHSHLCSLITPHCLVPAPLYLGWLSVFQMHWALSLSWDFLLFPLPRILPPLPRSELGPSLTKDCDRTLCCMFLVSF

SEQ ID NO: 369 - protein, 68 aa, Homo sapiens
  misc_feature (61): Xaa equals any of the naturally occurring L-amino acids
  misc_feature (65): Xaa equals any of the naturally occurring L-amino acids
  misc_feature (67): Xaa equals any of the naturally occurring L-amino acids
  misc_feature (68): Xaa equals any of the naturally occurring L-amino acids
EGAPTAKQLELEHFSSLGLRLGLHISLLASPACQLQILRLLSLHNCTGKFLIINLLYTQKXKKKXGXX

SEQ ID NO: 370 - protein, 97 aa, Homo sapiens
FVEVSQLYDCNWIVVNCSTPANYFHVLRRQILLPFRKPLIIFTPKSLLRHPEAKSSFDQMVSGTSFQRVIPEDGAAARALSRCSGSSSARERCTMTW

SEQ ID NO: 371 - protein, 54 aa, Homo sapiens
QLLIISQKNTIMYKFRGFCIPCFFGYKYAKLKMFANTCFQFLNFSSVALLIMLK

SEQ ID NO: 372 - protein, 112 aa, Homo sapiens
NASRHCAGCVAWPSQPIQYFSPHFPGRNLRRQNVRFLLEPRLQGPWFSVTSCCRTLFLSLLWLLGSSEGSFRLALSHHISSGVWAFLSPSPLGSVSSLLCFLRSRPDVSYQL

SEQ ID NO: 373 - protein, 49 aa, Homo sapiens
LLPMLASNSWAQAILLPWPLLKCWDTVMSHHTCQVLCDTMHLFNADWET

SEQ ID NO: 374 - protein, 73 aa, Homo sapiens
  misc_feature (69): Xaa equals any of the naturally occurring L-amino acids
  misc_feature (73): Xaa equals any of the naturally occurring L-amino acids
QQWFRTYLQIFWADDYLLAFTSPEPSLNYGLSNSSWFNCDIILVGVIIYLLGYNDVMVILRINVQKPTXKKTX

SEQ ID NO: 375 - protein, 68 aa, Homo sapiens
RFLYAGEFKRNQHRYFKKVHVFLSLKYLFIKGQTQRLTPVIPALWEAGRSQGQEFETGLANMVKPRLY

SEQ ID NO: 376 - protein, 38 aa, Homo sapiens
  misc_feature (35): Xaa equals any of the naturally occurring L-amino acids
  misc_feature (38): Xaa equals any of the naturally occurring L-amino acids
HHKTSSSSLILLNLNTLKLLGSFSTSSLLWHSSTXSTX

SEQ ID NO: 377 - protein, 20 aa, Homo sapiens
  misc_feature (18): Xaa equals any of the naturally occurring L-amino acids
VGSLSRYKGVFSHEWKPXQS

SEQ ID NO: 378 - protein, 186 aa, Homo sapiens
VRPQVPVRNSRVDPRVRRGRVPGAWRRWCCGGCWPPCCTARSWWNVCQSRGLSDVRRSSRPSHCCRPSCGARTRPAACRTSRLGPWAPCAAALSDLETPSPRSYAAASEAARGHHQVARGALAQTFNPGLCGAEAACFSFRALQWHQCGGVIPGTARGFESRLGLLACRHPTHKSLGQTARSVEVL

SEQ ID NO: 379 - protein, 63 aa, Homo sapiens
  misc_feature (7): Xaa equals any of the naturally occurring L-amino acids
  misc_feature (50): Xaa equals any of the naturally occurring L-amino acids
  misc_feature (60): Xaa equals any of the naturally occurring L-amino acids
SNSSLLXKAGCGGYWIWPLDFPNLPPYSPLFSLLTPQPDQFGLFLSLLTXIILNQKKKGXRLR

SEQ ID NO: 380 - protein, 80 aa, Homo sapiens
  misc_feature (27): Xaa equals any of the naturally occurring L-amino acids
  misc_feature (72): Xaa equals any of the naturally occurring L-amino acids
WKPLGSIYVLGWADGIVVLGRSEVAVXPPLRSKLGERGGLVWCDIGSWNYRMMGSDRFEKNARTLRGSETSXTYRSGGKV

SEQ ID NO: 381 - protein, 57 aa, Homo sapiens
DGSDVHHDNAAGLLWKISAEVTVRHFVISLLFLKKMSVPIHPLTVCHLLKVYSICIN

SEQ ID NO: 382 - protein, 77 aa, Homo sapiens
  misc_feature (22): Xaa equals any of the naturally occurring L-amino acids
  misc_feature (34): Xaa equals any of the naturally occurring L-amino acids
  misc_feature (40): Xaa equals any of the naturally occurring L-amino acids
  misc_feature (41): Xaa equals any of the naturally occurring L-amino acids
  misc_feature (49): Xaa equals any of the naturally occurring L-amino acids
  misc_feature (59): Xaa equals any of the naturally occurring L-amino acids
SPQLEWPWLFCNCCQNHHKLYXIKAPFALPRRTXHFKQKXXSLFVLENXVFKLFLVDTXHNGKITKLNLFYGWQLGA

SEQ ID NO: 383 - protein, 34 aa, Homo sapiens
  misc_feature (3): Xaa equals any of the naturally occurring L-amino acids
  misc_feature (20): Xaa equals any of the naturally occurring L-amino acids
KDXKSVRKLDRHHLNQVIKXNIISNKTSQHYVTP

SEQ ID NO: 384 - protein, 76 aa, Homo sapiens
PIRTLFSTLWTKLEDSSWSTFFLHPLCGSRFQTAFESRTGDTGGGITESLPPVRQYFKFWFPSLVCHDHTLSRVLR

SEQ ID NO: 385 - protein, 45 aa, Homo sapiens
LVPHHNLGCEEFVTSNGTGFGTMFSPNCIAWFFPFLADEMTSRVS

SEQ ID NO: 386 - protein, 135 aa, Homo sapiens
  misc_feature (2): Xaa equals any of the naturally occurring L-amino acids
  misc_feature (8): Xaa equals any of the naturally occurring L-amino acids
TXKPDSTXRERCHACRYRSGIPGSTHASGRDKMADKEKKKKESILDLSKYIDKTIRVKFQGGREASGILKGFDPLLNLVLDGTIEYMRDPDDQYKLTEDTRQLGLVVCRGTSVVLICPQDGMEAIPNPFIQQQDA

SEQ ID NO: 387 - protein, 52 aa, Homo sapiens
ERAVGRKGVSIAEIGLGVGATLSVGSSGVAAGPSRGPGVGSENVLGDQSPTF

SEQ ID NO: 388 - protein, 96 aa, Homo sapiens
GGNNSVSNKQNDTEMHSVVMKEPVYLCSKSGTIPLSRARSGGTRSASFCACRETKPHEPHPTLQEERGLDGKNLFCCFGKHTADLQTSCDGVSSDV

SEQ ID NO: 389 - protein, 62 aa, Homo sapiens
  misc_feature (2): Xaa equals any of the naturally occurring L-amino acids
TXSITEHLELLAICCKVFVLKCLAYTPLTFKCPTFGLYVKKLEEKPCWSFDVECNNTSIKVF

SEQ ID NO: 390 - protein, 41 aa, Homo sapiens
FSTINCGHTLSPCSFCNLKMVYKLPNPIGRLGSSLWFSLCA

SEQ ID NO: 391 - protein, 31 aa, Homo sapiens
AVVLCSINKAVRQQLQRKFPFKTYIVTYLSL

SEQ ID NO: 392 - protein, 75 aa, Homo sapiens
  misc_feature (58): Xaa equals any of the naturally occurring L-amino acids
VSHPMNTVFSIYGWKKSTCKWNCTVQTHAVQGLTVDCRILICISLISKELESFSYLLXVYMSSFMNYSFGCFTII

SEQ ID NO: 393 - protein, 125 aa, Homo sapiens
HPLFPTILPTSTLCFIHLSLLPDPLSSLSPILGGTCSPVVMVLMTSSGQPPCPGIMACQHSLCPPNLRPRMRSCQHNIHPFEQMESGTLTQPSVLNNTAIIATCSVVNVNPQSQLNYFRPNILFL

SEQ ID NO: 394 - protein, 82 aa, Homo sapiens
  misc_feature (78): Xaa equals any of the naturally occurring L-amino acids
QHGLWNQIDLDTNHMSNTCYLCDLGQPPPSASVFSSVKWGEFPSRLSGDLNEIIPGKCLEHSMWSLNRPWLTVLLLLXFCLN

SEQ ID NO: 395 - protein, 112 aa, Homo sapiens
  misc_feature (53): Xaa equals any of the naturally occurring L-amino acids
QPWCLGSLEEARVSNNLQDALRTGTGAGTLDKVQIPGPFPLRVQKGRVRTCQXWLQDVDWTDLDSWELCAKVLGAKCHNAPRLSLAFTGDSPAASGQWESLAFGGMIQECKR

SEQ ID NO: 396 - protein, 85 aa, Homo sapiens
PILRFIWLKRCQKFNQHSLLFTSPKSQNGGKLHNKWAAVFGSALQGTIFLNYLNFRSLLSSPTRDFGEIKRYLDIRKVIKLLPFH

SEQ ID NO: 397 - protein, 59 aa, Homo sapiens
TPTPPQTHKNLENLDKIMKQWVLDFGQQQCRTVIPKRRETNKVSFTVTHPPWLFAWGTF

SEQ ID NO: 398 - protein, 93 aa, Homo sapiens
AFNEPVLTDECILGTTNQRIQLRPREARVSTPGTPLAPPSSPGAGSLCLSQDAVRGLSFWKLLDLVPAPPSPTSAPGVYLSSYFLIWSSKEQI

SEQ ID NO: 399 - protein, 50 aa, Homo sapiens
LTILKMQENDFHKVKIIDTLKGRDGVVIGEGHMSRLLGLWQCYFLIWGKR

SEQ ID NO: 400 - protein, 61 aa, Homo sapiens
HCGIRGYGGCSAFKDKAEMFSKWLYQSILPPVPTTILSKSSLFSHFLLFASLPRINTMFLS

SEQ ID NO: 401 - protein, 66 aa, Homo sapiens
  misc_feature (10): Xaa equals any of the naturally occurring L-amino acids
KCPLPSGSVXNVILYSKFRLFFGFILSCFFKVVYVIMSLLEESYSFPLISHSCPLPLCRTEYFILL

SEQ ID NO: 402 - protein, 80 aa, Homo sapiens
  misc_feature (51): Xaa equals any of the naturally occurring L-amino acids
CKCSVTISCIVFHKTTLALNILYEQLSRATSLVYSNCNVRVLIYIATASFXYLISYGLMFRLFPTFLHLNSINKCGFSFL

SEQ ID NO: 403 - protein, 110 aa, Homo sapiens
  misc_feature (20): Xaa equals any of the naturally occurring L-amino acids
CHFGTHRLTAEERNQAILDXKAAGWSELSERDAIYKEFSFHNFNQAFGFMSRVALQAEKMNHHPEWFNVYNKVQITLTSHDCGELTKKDVKLAKFIEKAAASVLFLPKYM

SEQ ID NO: 404 - protein, 66 aa, Homo sapiens
VISAMLMSVRSGCFQLTLSFGGDSLYNCINHNIMFHFYLRCQETQGQIYSLNTATAIALSVRTTTF

SEQ ID NO: 405 - protein, 109 aa, Homo sapiens
  misc_feature (12): Xaa equals any of the naturally occurring L-amino acids
CRYLVRNSRVRXTRPIQCKGCAVCQLYDLMYGVCCASVICKYYTILYQRLEHLWIWVSVGRSNHCPLILRGDCWHGCHKSQNSLCICCLSLHLNQYSRIFFYIFACGLH

SEQ ID NO: 406 - protein, 46 aa, Homo sapiens
  misc_feature (12): Xaa equals any of the naturally occurring L-amino acids
MVKAIVPKVSPXRLPPDKSWFGGDVWSQIFSGKVAVWWILHPVPRL

SEQ ID NO: 407 - protein, 51 aa, Homo sapiens
  misc_feature (2): Xaa equals any of the naturally occurring L-amino acids
  misc_feature (6): Xaa equals any of the naturally occurring L-amino acids
  misc_feature (8): Xaa equals any of the naturally occurring L-amino acids
  misc_feature (12): Xaa equals any of the naturally occurring L-amino acids
  misc_feature (15): Xaa equals any of the naturally occurring L-amino acids
  misc_feature (16): Xaa equals any of the naturally occurring L-amino acids
  misc_feature (41): Xaa equals any of the naturally occurring L-amino acids
AXWLNXLXRVRXYDXXKVHLSLTNGPLKTLSLFGKVTTVCXCVPSRESFIY

SEQ ID NO: 408 - protein, 100 aa, Homo sapiens
PLVASAGNCAPARPPAEPGPCMPSPLFLRKPSEPPDAWTLAVVDADSRALLNPVLLPCDGCRHCPQTAVPQTSFVFWSDLPEGVLFKSYLLIFIMTYNPK

SEQ ID NO: 409 - protein, 50 aa, Homo sapiens
SPARWLRVPSCPLPLLFLLVFTYPPSNFCPIISPLYCKLRRKLHNCRDEK

SEQ ID NO: 410 - protein, 90 aa, Homo sapiens
ADFTLTITAWIERAIYIFVFISHLRSLQHGTLEQRFRDTKLINTFNIAKHLKDKCTHVAKKKKSVCNFDLSQGCEESFQVSEISVAKILF

SEQ ID NO: 411 - protein, 89 aa, Homo sapiens
GAGLSASCVLSRVETGVDPGAPVPRHRLLQFLQTVPIPPRVARRDLEFAMLRAVSTWRFRLDPSCSGARLGGPRSLSFLASLGCGTKTI

SEQ ID NO: 412 - protein, 86 aa, Homo sapiens
STRVHRCVLHRHLVILVESLRHHSGQLPPPLCPQVPAKTVLSPQLLKAHIIGRAFAGGGPGLGASLMDRAQVPFILTATCGFCSNC

SEQ ID NO: 413 - protein, 72 aa, Homo sapiens
VSNLLKGVPIETRSGARPPLGPGPGCGASHSAPLPKAPLCVGAPLSFPPRQQKIRAEKRIRSAERELNPSRF

SEQ ID NO: 414 - protein, 58 aa, Homo sapiens
GIVSMVHYYRSFSGCVKHRKPGRGGTGCSPEREASSWSCLLQLPFPVDDHALPSEEGE

SEQ ID NO: 415 - protein, 44 aa, Homo sapiens
  misc_feature (43): Xaa equals any of the naturally occurring L-amino acids
  misc_feature (44): Xaa equals any of the naturally occurring L-amino acids
GIQRCLNTAQICYLPHKFTYMHLIKFYSDLIIQKKKKKKGGGXX

SEQ ID NO: 416 - protein, 55 aa, Homo sapiens
GLTRVYFLLCNILKEATTFGKVYLLLLGPCLYTYLNKHIHLPEKKKKKKKKKKVD

SEQ ID NO: 417 - protein, 68 aa, Homo sapiens
PPQVPGAEVSIHSVDQKASRMCQRKALELSFLLEKERRRKKKEEAGAGGRGAGGAGQGGGSLLPLRNS

SEQ ID NO: 418 - protein, 55 aa, Homo sapiens
PFIISHWPALTPFRKGTQSSPSSQSHAIMVGVQLLTKVSSSVKSMPSGGLLVNKY

SEQ ID NO: 419 - protein, 57 aa, Homo sapiens
  misc_feature (21): Xaa equals any of the naturally occurring L-amino acids
  misc_feature (43): Xaa equals any of the naturally occurring L-amino acids
  misc_feature (47): Xaa equals any of the naturally occurring L-amino acids
WVNLRFQSQKLQVVVTFLHMXNPKMWKCCQAGQISTLKYEGNXTKQXFSQGSMIEWR

SEQ ID NO: 420 - protein, 50 aa, Homo sapiens
  misc_feature (35): Xaa equals any of the naturally occurring L-amino acids
  misc_feature (39): Xaa equals any of the naturally occurring L-amino acids
  misc_feature (41): Xaa equals any of the naturally occurring L-amino acids
  misc_feature (48): Xaa equals any of the naturally occurring L-amino acids
RPRAQTQKECQKVQLKKSFQKGMGRGPVPFGLKVXSVSXGXCVQGMTXSF

SEQ ID NO: 421 - protein, 47 aa, Homo sapiens
FLLCMMYLLHHAGHCSRYRSYALFGPQLQVTNSPIRIHAHRDQHDTT

SEQ ID NO: 422 - protein, 73 aa, Homo sapiens
IKYSCLEGMISPQKIGKHLTHFLHIPNFYLFHVIVMGSSYRAASSVFPSCVRYWQQSQRCNVGYMKFISKWRP

SEQ ID NO: 423 - protein, 67 aa, Homo sapiens
  misc_feature (40): Xaa equals any of the naturally occurring L-amino acids
FPLSNQTINELNIIGSCRMVRLSQDPTLFDFLSRCSTTLXSILFLLHILFLLVSGAMKSIKKKKKVD

SEQ ID NO: 424 - protein, 55 aa, Homo sapiens
  misc_feature (55): Xaa equals any of the naturally occurring L-amino acids
ITKIIVINYRNNLAIITYLYTVEKDTVCERSHSQCVSVVSYLFTFKISVFLSFLX

SEQ ID NO: 425 - protein, 91 aa, Homo sapiens
  misc_feature (86): Xaa equals any of the naturally occurring L-amino acids
RRGLKMNEDVEWKKSQKNTYSRFIYIKISIKQIKPNNILCGRAIHKRLKQNCKERSDNRIQDSGPFLGEERVVIRKGHIGGVVIFXFLTWV

SEQ ID NO: 426 - protein, 50 aa, Homo sapiens
  misc_feature (41): Xaa equals any of the naturally occurring L-amino acids
  misc_feature (47): Xaa equals any of the naturally occurring L-amino acids
VHQFLIQREAEYSNSRSLCVLTGNTIFERTWHLKCPIKSSXERGSLXMCN

SEQ ID NO: 427 - protein, 44 aa, Homo sapiens
  misc_feature (7): Xaa equals any of the naturally occurring L-amino acids
  misc_feature (30): Xaa equals any of the naturally occurring L-amino acids
  misc_feature (42): Xaa equals any of the naturally occurring L-amino acids
VLSYVSXVMVLTYIFIQMLQSQTEILKKIXTKMYLCTLGLKXAH

SEQ ID NO: 428 - protein, 79 aa, Homo sapiens
  misc_feature (15): Xaa equals any of the naturally occurring L-amino acids
NNRCLDEFYKQGNSXEEGCVAKYTLRLQTYGFILSISLIFTGPKLRLKLVSQLWVWQCTLVRRSPALKSGLCLNHSSAF

SEQ ID NO: 429 - protein, 164 aa, Homo sapiens
  misc_feature (114): Xaa equals any of the naturally occurring L-amino acids
FWLQGCLVFNLRLLPPEERWPGRGRVPVQLAPVSRCSCRRRSLIHQDSPLSAHRFAGLPASGFTVRAVGATRAGLGRQGRQPGSPGQPHTCTRPARRRGPPAGRHGGRRPLPPXCPPWPKPCWSVEAVGSSDPGIPSVPDPSPGPSPTQHTHSFIHACIPKADT

SEQ ID NO: 430 - protein, 56 aa, Homo sapiens
TGFGHFIKLQACFMLPSKPKNWFKSQNGQIKIISGLFHFKQIYIHAMMMVCVSLVL

SEQ ID NO: 431 - protein, 90 aa, Homo sapiens
GSGDMSSRGTKESPQIPPGLRRSVTCMVAPWKAQALRKPALNIPFTMHRNGVFSFLEGLTASLCAKVPSHPMVILLPIVILIPGQPCLKK

SEQ ID NO: 432 - protein, 187 aa, Homo sapiens
HGDPFTRKPLFIIVDSSNSVAYKNFTNLFGQPLVCLLSPTAYPKALQDQSQRGSLFTLFLNNPLMAFLFVSGLSSMRRGLWEKCQEYLRKINRDIAQLLTHSRSIDQAFLQFFGDEFLRLLLTRFIFCSATMRMHKIFRETRNYPESYPQLPRDETVENPHLQKHILELASILDVRNVFFENTIDDY

SEQ ID NO: 433 - protein, 57 aa, Homo sapiens
  misc_feature (10): Xaa equals any of the naturally occurring L-amino acids
  misc_feature (23): Xaa equals any of the naturally occurring L-amino acids
  misc_feature (34): Xaa equals any of the naturally occurring L-amino acids
  misc_feature (38): Xaa equals any of the naturally occurring L-amino acids
TRVLLFGISXFRALHLTRWQFPXYNFSRANTLEXLFMXLFFLRACKQYASKFFSSWL

SEQ ID NO: 434 - protein, 55 aa, Homo sapiens
  misc_feature (15): Xaa equals any of the naturally occurring L-amino acids
  misc_feature (42): Xaa equals any of the naturally occurring L-amino acids
LYILETDSSKLLDYXASFKHHWALYFSLSVLFIMEYNRLYLXQKLGLRWKPTCDF

SEQ ID NO: 435 - protein, 75 aa, Homo sapiens
  misc_feature (24): Xaa equals any of the naturally occurring L-amino acids
  misc_feature (64): Xaa equals any of the naturally occurring L-amino acids
  misc_feature (69): Xaa equals any of the naturally occurring L-amino acids
  misc_feature (71): Xaa equals any of the naturally occurring L-amino acids
KGKKSWRKNKTYTETIEDQLQTSXILCQKCFKNLHMNTEELWSIGMINNRRINLIKLLLGVDGXKLKGXYXGLPH

SEQ ID NO: 436 - protein, 45 aa, Homo sapiens
RMSQMRVLTPFNIVRIGNPTHHSCFYLLSQNGHCVFPCCICGYWP

SEQ ID NO: 437 - protein, 86 aa, Homo sapiens
  misc_feature (59): Xaa equals any of the naturally occurring L-amino acids
VLKYRLLMLFQWLNDVKVSIFVLLLSPHAHNVSAEIVALTFAFEAGRRNLEVLTSCRCXFLSKRQASPEFPPVNLCLHLGWGVKGS

SEQ ID NO: 438 - protein, 47 aa, Homo sapiens
  misc_feature (9): Xaa equals any of the naturally occurring L-amino acids
  misc_feature (11): Xaa equals any of the naturally occurring L-amino acids
  misc_feature (35): Xaa equals any of the naturally occurring L-amino acids
  misc_feature (40): Xaa equals any of the naturally occurring L-amino acids
  misc_feature (42): Xaa equals any of the naturally occurring L-amino acids
ARQFDKMEXDXLLVTKKHFLKFIPWNTGLTIGREXIIIKXTXGDQEG

SEQ ID NO: 439 - protein, 50 aa, Homo sapiens
QSHFLLMYLQVKEYVKTIEYCATLMCIYKIALFYNKVICVDSVMKEIFSP

SEQ ID NO: 440 - protein, 177 aa, Homo sapiens
REQKLELHRGGGRSRTSGSPGLQEFGTSWMAPEVIKSSLFSKGSDIWSYGVLLWELLTGEVPYRGIDGLAVAYGVAVNKLTLPIPSTCPEPFAKLMKECWQQDPHIRPSFALILEQLTAIEGAVMTEMPQESFHSMQDDWKLEIQQMFDELRTKEKDHKTNRGDWRLCRGLGCHLSE

SEQ ID NO: 441 - protein, 55 aa, Homo sapiens
PSLWVCASVIHTQHTSWLSAAAAMCPLNGEGQKELWLCAWGGGLPNGMDDAMFPV

SEQ ID NO: 442 - protein, 192 aa, Homo sapiens
  misc_feature (17): Xaa equals any of the naturally occurring L-amino acids
  misc_feature (111): Xaa equals any of the naturally occurring L-amino acids
GLKARYQTMSILPMELXKEFAEYVTNHYRMLCAVLEPALNVKGKEEVASALVHILQSTGKAKDFLSDMAMSEVDRFMEREHLIFRENTLATKAIEEYMRLIGQKYLKDAIXEFIRALYESEENCEVDPIKCTASSLAEHQANLRMCCELALCKVVNSHCLPSCSCGPSFPVSLTPVSTPSPPTTPLSMFPGS

SEQ ID NO: 443 - protein, 59 aa, Homo sapiens
LDQIIRKLVDALGRQSTLGLIKSLSSIKRLGEVLWSLSNAYERQIKTNCETWKLDEFQY

SEQ ID NO: 444 - protein, 74 aa, Homo sapiens
  misc_feature (60): Xaa equals any of the naturally occurring L-amino acids
LCDNGYRCLMSLCLSFCVYATCGTTGEVEGIQDHRIGNWKPGLSFSTMSIRLHLIFKISXKILSKNKICKERSI

SEQ ID NO: 445 - protein, 95 aa, Homo sapiens
  misc_feature (10): Xaa equals any of the naturally occurring L-amino acids
CWKGASLLIXNLRWTSHGCRWLLTYKGDCDQLLRTVWLYFLQRPDLVVCQSSPPLILRGYEPRPPNGCLKSQIVPNPIYAMFFSYTCILAIKFNL

SEQ ID NO: 446 - protein, 76 aa, Homo sapiens
  misc_feature (8): Xaa equals any of the naturally occurring L-amino acids
  misc_feature (23): Xaa equals any of the naturally occurring L-amino acids
KGHLFAVXELKKKKGRATPCSTXTRNMLVRQVKFFTTLSMSRNDQKALRVLFGGLQIKQVRSSQIQNPRIMRMDCT

SEQ ID NO: 447 - protein, 37 aa, Homo sapiens
  misc_feature (20): Xaa equals any of the naturally occurring L-amino acids
SVGLSFFISFAHYYHTISLXVKNNFEEAMPDKSGIGE

SEQ ID NO: 448 - protein, 45 aa, Homo sapiens
  misc_feature (17): Xaa equals any of the naturally occurring L-amino acids
  misc_feature (18): Xaa equals any of the naturally occurring L-amino acids
  misc_feature (33): Xaa equals any of the naturally occurring L-amino acids
FCSSLLESLGAGILNAXXLNTQFVNKFPVSLLXASLHILSIFVKG

SEQ ID NO: 449 - protein, 59 aa, Homo sapiens
  misc_feature (11): Xaa equals any of the naturally occurring L-amino acids
  misc_feature (46): Xaa equals any of the naturally occurring L-amino acids
LSKQNRAFSYXFHSKLPEPQLCLIFSGARGSHIAFTVCLQRATELXLMHFMLQPPVAKL

SEQ ID NO: 450 - protein, 57 aa, Homo sapiens
YLTSVYLGERPYLCDYPDCGKAFVQSGQLKTHQRLHTGEKPFVCSENGTVLEVKFME

SEQ ID NO: 451 - protein, 175 aa, Homo sapiens
  misc_feature (101): Xaa equals any of the naturally occurring L-amino acids
  misc_feature (154): Xaa equals any of the naturally occurring L-amino acids
  misc_feature (161): Xaa equals any of the naturally occurring L-amino acids
IVLLLEGSLVWAPREDPVLLQGIRVSIAQWPALTFTPLVDKLGLGSVVPVEYLLDRELRFLSDANGLHLFQMGTDSQNQILLEHAALRETVNALISDQKLXEIFSRGPYSVQGHRVKIYQPEGEEGWLYGVVSHQDSITRLMEVSVTESGEIKXVDPRLIXVMLMDNSTPQSEVQ

SEQ ID NO: 452 - protein, 88 aa, Homo sapiens
  misc_feature (42): Xaa equals any of the naturally occurring L-amino acids
DHLILILLIGTLLIQELIAEAEFLATSPVEVQANFALQMAAXAEQAALHSLLINMLFSSLSESRALYSLPPFPNKQAKHALPLFPLIA

SEQ ID NO: 453 - protein, 63 aa, Homo sapiens
VRGEGWHRAGWGHRSPWGRCSPLNEVGLYQIPRVKHREEDPACKPCSRTAPSSCPVCACIRFV

SEQ ID NO: 454 - protein, 64 aa, Homo sapiens
TFLPSKINYMSEFFSLSSESSESKPSSLHSPVRRCISFSLVTIKLDTQSAFCICGFNQPWIQNI

SEQ ID NO: 455 - protein, 69 aa, Homo sapiens
ESVYFMPASVLDTMAITQFSRNSQFGERERNTKYVTSCHSSLKKKKEKKVRPGAVAYACNPSTLGGRGG

SEQ ID NO: 456 - protein, 93 aa, Homo sapiens
APLILELSFQIHLAAWRFSEPKKRCKNYLGQLGEQGKEEIRNKEVPKAGTYFGETPRPALSLETQHSTEQNRHSSCPRADSQVGEMNVQQSCT

SEQ ID NO: 457 - protein, 161 aa, Homo sapiens
  misc_feature (107): Xaa equals any of the naturally occurring L-amino acids
  misc_feature (136): Xaa equals any of the naturally occurring L-amino acids
  misc_feature (139): Xaa equals any of the naturally occurring L-amino acids
  misc_feature (143): Xaa equals any of the naturally occurring L-amino acids
  misc_feature (148): Xaa equals any of the naturally occurring L-amino acids
  misc_feature (156): Xaa equals any of the naturally occurring L-amino acids
ARPARCIRASISESPPHAGADGCEDAGTRDAGPGRSRRRRRQPDLTPSGPPLEPAPRVPLCFFAFLSSCRSSLSPQFMSSCAHLPDLCDLALPWPEAASLRAFYWAXLFPEPQRLLPKLPRKGPGAEVRPGRRQAXPLXPSLXGRCAXLRVSRPNXRAIHG

SEQ ID NO: 458 - protein, 99 aa, Homo sapiens
  misc_feature (88): Xaa equals any of the naturally occurring L-amino acids
MSLLKLILLRVPCRATACQKGLTTQTFPLSPQSPKGQLAACSNKMSFLFRAEEVSLSFISKNDSLSFSQKCTDKPTEINLGRKRNGEXTLEYTSKVETK

SEQ ID NO: 459 - protein, 108 aa, Homo sapiens
QHFCVSFLWGGGNRKGIKNPISVNKSYQHVSKFRLCHTCGWKAVATQNNSLKSKTCSSEKSDKANPCPQDPAGMPLGGRRPEFGCRNLENLEVLFHSNFFLQVVYTLP

SEQ ID NO: 460 - protein, 47 aa, Homo sapiens
  misc_feature (15): Xaa equals any of the naturally occurring L-amino acids
  misc_feature (20): Xaa equals any of the naturally occurring L-amino acids
PVPNSRVDPRVRRRXPLHLXLDSQIFKILLNSKLRTVFIMTILVSFH

SEQ ID NO: 461 - protein, 157 aa, Homo sapiens
  misc_feature (141): Xaa equals any of the naturally occurring L-amino acids
  misc_feature (150): Xaa equals any of the naturally occurring L-amino acids
GTAETFHSVHFCPQPVPKAPESPSLDSALASPLDPQALACTPASPPDSQPPASPQDSEALDFETPSSSLAPQTPDSALASETLASPQSLPPASPLLEDREEGDLGKASELAETPKEEKAEGAAMLELVGSILRGCVPGVGXTANGLAGAXGKSASAF

SEQ ID NO: 462 - protein, 43 aa, Homo sapiens
GESFPASLVTAFEAEQVSHWVSDSKLVKTGNRMESLDTDIGDR

SEQ ID NO: 463 - protein, 54 aa, Homo sapiens
  misc_feature (10): Xaa equals any of the naturally occurring L-amino acids
MNKQIVEHLXMKYYSAIKKEWSIDRHNKEEFKMHCAKRNKPASKGYIQIIKLHS

SEQ ID NO: 464 - protein, 91 aa, Homo sapiens
TKYCPLTGFLLHPEKDTFSCSSSFIGDKPPPRDFTNELVKEVPKNIFLLSLFFLHQNPLLQNFFRIFFSPRSEECVNILNKISGHLQPLCK

SEQ ID NO: 465 - protein, 53 aa, Homo sapiens
QYVHNVNTAKRSVRPNIFSIHFLLLLLSIATKASFIQLCNSSNIVANVNVYFQ

SEQ ID NO: 466 - protein, 86 aa, Homo sapiens
MLRTDQVHQTAPHPCSMFWIGELWGWRCRTFKKLLKISCCEYFRYIKKHWLTISQCSAILTCLSRQNLLKSLPSCIPSVFKFGGKT

SEQ ID NO: 467 - protein, 280 aa, Homo sapiens
ADAWADAWADAWVSPVSRQSIRNSQKHSPTSEPTPPGDALPPVSSPHTHRGYQPTPAMAKYVKILYDFTARNANELSVLKDEVLEVLEDGRQWWKLRSRSGQAGYVPCNILGEARPEDAGAPFEQAGQKYWGPASPTHKLPPSFPGNKDELMQHMDEVNDELIRKISNIRAQPQRHFRVERSQPVSQPLTYESGPDEVRAWLEAKAFSPRIVENLGILTGPQLFSLNKEELKKVCGEEGVRVYSQLTMQKAFLEKQQSGSELEELMNKFHSMNQRRGEDS

SEQ ID NO: 468 - protein, 133 aa, Homo sapiens
  misc_feature (121): Xaa equals any of the naturally occurring L-amino acids
  misc_feature (132): Xaa equals any of the naturally occurring L-amino acids
SLTGKLPRLQVPGPEFPGRPTRPIFPILQHLDINGSSDSSTLPKLEEFCTSLTQSEQSADGSQSEPNNSQTQPKQIQLSTAAPCSTTAVDDSAEKPSGSVESSPEILKNEDFSSSRAITLXKDKRQESVDQXL

SEQ ID NO: 469 - protein, 43 aa, Homo sapiens
  misc_feature (3): Xaa equals any of the naturally occurring L-amino acids
  misc_feature (29): Xaa equals any of the naturally occurring L-amino acids
ARXLTPVIPALWEAEVCGSRGQEFKTKPXQDGETPSLLKIQGG

SEQ ID NO: 470 - protein, 78 aa, Homo sapiens
TREAVAAVSQNLHHCTPAWATERDSISKKKKKKKKATKRNPFSQETKNEHFGLSLLNDYSFPDTDFGFESQTGIGSTA

SEQ ID NO: 471 - protein, 149 aa, Homo sapiens
  misc_feature (126): Xaa equals any of the naturally occurring L-amino acids
  misc_feature (129): Xaa equals any of the naturally occurring L-amino acids
AKEGNLRRNQPCLHLDLGGPVSRTVKKMNWCCLNPPVVVFCHGGPRRQYTTQRNILSTFSLFHFIVFSPSFLSFSLLLSFSSLLFPLVFNFNFNFWPSYTSICLSRKLNSRQLIIHLISSAKQMPXMVXFVIRLLWDQNVSYSSGKNET

SEQ ID NO: 472 - protein, 124 aa, Homo sapiens
  misc_feature (8): Xaa equals any of the naturally occurring L-amino acids
  misc_feature (93): Xaa equals any of the naturally occurring L-amino acids
  misc_feature (103): Xaa equals any of the naturally occurring L-amino acids
  misc_feature (105): Xaa equals any of the naturally occurring L-amino acids
FLEAVWCXTQQGPFVGQQEGGVGGLSRRGTMRAFHEPSQALLHHGRPGPPSRPWGCSGCRQRLGRPDSGVRSRDWGRRARTGKRGSDQSRPCXLPGAQVGTSXLXLCTNLNPPPERMCVRSQKR

SEQ ID NO: 473 - protein, 118 aa, Homo sapiens
  misc_feature (99): Xaa equals any of the naturally occurring L-amino acids
  misc_feature (114): Xaa equals any of the naturally occurring L-amino acids
  misc_feature (115): Xaa equals any of the naturally occurring L-amino acids
  misc_feature (117): Xaa equals any of the naturally occurring L-amino acids
LTISGRLAQAMGGELSATSTPEVGKLFLFTLAVTCCHAPVPKTVNQAVRLDGLRLLLIEDNPLTQRITIEMLKTSGAQIVAVGNAAQALETLQNSEPFXAALVDFDLPDIDGIXXAXQ

SEQ ID NO: 474 - protein, 92 aa, Homo sapiens
  misc_feature (56): Xaa equals any of the naturally occurring L-amino acids
IRHEATGSPALSGPSAALGSLTMRCCLWATATALTFPFGPSRTAGALTGVRSSPSXPGLLLLASWVRGLWREHHGQLGGGGLKRGPQLGTWC

SEQ ID NO: 475 - protein, 19 aa, Homo sapiens
TRSYLIRKARQAKARRIAP

SEQ ID NO: 476 - protein, 52 aa, Homo sapiens
  misc_feature (4): Xaa equals any of the naturally occurring L-amino acids
IRHXNKTAANLVVETGQDGVQIRSLSKETTRYNHPKPNLLYQKFVQGIRGCG

SEQ ID NO: 477 - protein, 46 aa, Homo sapiens
PRETPSLLKYKKKLAGRGGHTPVVPAYFRRLRQENCLKLAGVVEVA

SEQ ID NO: 478 - protein, 50 aa, Homo sapiens
  misc_feature (31): Xaa equals any of the naturally occurring L-amino acids
SSNTVRRCPETAGLPSLALVGVELSEASPGXSRRKVEEGSSGAVGWVRVP

SEQ ID NO: 479 - protein, 23 aa, Homo sapiens
  misc_feature (3): Xaa equals any of the naturally occurring L-amino acids
LMXILCKCRMVEMTTKDLECDIN

SEQ ID NO: 480 - protein, 114 aa, Homo sapiens
  misc_feature (29): Xaa equals any of the naturally occurring L-amino acids
  misc_feature (47): Xaa equals any of the naturally occurring L-amino acids
  misc_feature (62): Xaa equals any of the naturally occurring L-amino acids
  misc_feature (92): Xaa equals any of the naturally occurring L-amino acids
  misc_feature (109): Xaa equals any of the naturally occurring L-amino acids
LQAPRCASPASPSRLRWRPRGHPPGPPTXGPQPRGELIPRRPDPAAXSEEGLRMESSVDDGXTATTADAASGEAPEAGPSPSHSPTMCQTGXPGPRPPAPQMAPLTPLXPFGAK

SEQ ID NO: 481 - protein, 134 aa, Homo sapiens
  misc_feature (38): Xaa equals any of the naturally occurring L-amino acids
  misc_feature (50): Xaa equals any of the naturally occurring L-amino acids
RPPPRPGRRALVLARARESAELPLPAGWEEARDYDGRXFYIDHNTRQTSXIDPRDRITKPLTFADCVGDELPLGWETVYDKQIGVYYMDHINKLTQIEDPRGTVEARQERMLKEYLIVAQEALNAKKEIYQIKQ

SEQ ID NO: 482 - protein, 74 aa, Homo sapiens
NLISLATGDTRSILVYIDSGSMAHQASTSRRVGTEGHATCPEYSRMLILLDDTAPIGIENWEWEENLKVVHTCL

SEQ ID NO: 483 - protein, 107 aa, Homo sapiens
NRDIKKKIFLYSCTIFCVLSCVITKEPKSYKIENTVKVSCLLLKKEKHFKINLMLPEYPVLIKSTVVYSNILGPSHFTHRSLTDSARATFSTESPIRGKCPIHVYHF

SEQ ID NO: 484 - protein, 53 aa, Homo sapiens
TLPWKTVNIILECEQPETTQEKGKKNSEDAKSWVASPFSFLIKGTIYKKKKKK

SEQ ID NO: 485 - protein, 45 aa, Homo sapiens
  misc_feature (43): Xaa equals any of the naturally occurring L-amino acids
NFHVRHLDYDTQGRSCLNVNSTEGRVAHSDILSVRLIHQMGAXSG

SEQ ID NO: 486 - protein, 93 aa, Homo sapiens
SGLFFFFFFFETESHSVTQAGIQWHYLSSLQPPPPRFKQFSCLSLLSSWDYRHTPPHAANFCIFSRDGVSPCWSGWSRTPDLVICPPQPPKVL

SEQ ID NO: 487 - DNA, 6422 bp, Homo sapiens
cccagctgccctgtcaaaccctgttcctgaccgatgaggagaagcgtctgctggggcaggaaggggtttccctgccctctcacctgcccctcaccaaggtaacatgcttcccctaagggtatcccaacccaggggcctcaccatgacctctgaggggccaatatcccaggagaagcattggggagttgggggcaggtgaaggacccaggactcacacatcctgggcctccaaggcagaggagagggtcctcaagaaggtcaggaggaaaatccgtaacaagcagtcagctcaggacagtcggcggcggaagaaggagtacattgatgggctggagagcaggtacgcctgggttatttctggcttcttgtgggccatgtctgggccccttcctcaccatgggaggcaaggtaagggactcaggttgctgagccttgtcctacctccctacattctagggtggcagcctgttctgcacagaaccaagaattacagaaaaaagtccaggagctggagaggcacaacatgtgagtgaaagcattgtgtgtgtatgtgtgttttgaaggcaggtacagcacacaggggtgccattcttggcccctggtacccagatgatactaactcttcattcctcctttcccagctccttggtagctcagctccgccagctgcagacgctaattgctcaaacttccaacaaagctgcccagaccagcacttgtgttttggtaccattagtctatctactcccatctccccccacacttctatccttataccccgactacccggccagatctacttcccacatccgataaccccagctggcctccgttcactctaccccctgctcccttcatctgttcctcttgcttcctcccagattcttcttttttccctggctctcatcatcctgcccagcttcagtccattccagagtcgaccagaagctgggtctgaggattaccagcctcacggaggtgagaggcaagggcagggagcaacccctggctgagcaagggagggggactctgttctccaaggtcgtcaagaagcaagagggaggtcctgtcctgtctagggtctcccacccaggggagcactctactactgccctcttgccttcacctcacagtgacttccagaaatatcctgacccacaaggacgtaacagaaaatctggagacccaagtggtagagtccagactgagggagccacctggagccaaggatgcaaatggctcaacaaggacactgcttgagaagatgggagggaagccaagacccagtgggcgcatccggtccgtgctgcatgcagatgagatgtgagctggaacagaccttcctggcccacttcctgatcacaaggaatcctgggcttccttatggctttgcttcccactgggattcctacttaggtgtctgccctcaggggtccaaatcacttcaggacaccccaagagatgtcctttagtctctgcctgaggcctagtctgcatttgtttgcatatatgagagggtacctcaaatacttctgttatgtatctgtgattttatttcttctttgggtatagggttgaggggaaataagttttgagtgagaaataaacgttttagctgaaattgtatcccagaagtttgaaataagtagtagaagagggggaaaacaagggagaagtggtggggaagacttggtagattggggccttaagtaaccacctcctttccctctctgcccccatgacttcctgctccaagttacagaagggaaggaaaccattttactctttttattctgctcattaatgatctgaaagaagaagatggggaaaaggggattccaccacaaggctccaaagaaccaagagtgcaaatcagtccatttcactttcactgtctgagatagggtctctaagacccaggatacaagggtggaatgtagctatatggactcgatttgcttccggaccttttccagagcctttctgtccaattgtcgctgacgaatgatgacaagacaagcgaagatcagggccacacacacgacagccccttcgaacttccaaaataagcgttgttccatcaaagctgagcggcagctgagggcaggaaggaatagttattcccaaggaaggccagacagcttctccctctaatttcccttctacttcagcctagccaggatacactcaagaggaaatcagagccaggcttctattgtgtgtatagtacataaatccctctcaaatagatcatttaatttattctctggataagcagagctagtattaaccaattttactgatgagaaaatatggccaataacatagtgctgaggagtagagctgggacttgggttcaagtaatttggctccaaatcccgtcttctttcttattatttttgagatggtgtctcgctctgtcacccagactggagtgcagtggcgtgaccttggctcactgcaacctccacctcccgggtttaagcagttttctgcttcagcctcccaagtagctgggattacaggtgcccgccatcatgcccagctaatttttgtatctttaagagagatgaggtttcaccatcttggccaggctggtcttgaactcctaacctcgtgatccacccgcctcggcctcccaaagtgctgggattacaggcgtgagccacccctcccagcctcttttttttttttttttttttgacacacagtctcgctccattgcccaggctggagtgcagtggcatgatcttggctcactctaacctctgcctcctgggttcaagtgattctccctgcctcagcctcccaagtagctgggattatgggcacccaccacaccagctaatttttgtatttttagtagagatggggtttcaccacgttggccaggctgatctcgaactcctgacctcaggtgatctgttagcctcagcctccctaagtactgggattataggtgtgagcccggccccctcttctttcagatattccatgctacccccagaccaggggaaaaggtgggaccatccatctaaagtcataggagcaaaggaggtgatctcagagaagagaaacagcactcaccttttgaactcatttctcttagatgagctgcatgtgattttctctacatatcctgtgggaccacactcaggggtagttttctgccaggagaaaaggagcaaagtacatgttaggaaggggcaacaggataaacaaaaaggctgccattcagaaggtgcaggtgcccaactgctatggtttggagtggtaggcaacagagagctaatgaaagagttctgatgcggatggtggaggtggtggttgcatgattacgaatgtatgttagaacacttcaggggcaacagtctaggagtggcaaagatacattccattccagagcctactatactaaaagtgaataaaacatagttatttgaggccgggtgtggcggctcacgcctataatcccagcactttgggaggccgaggcgggcagatcacgaggtaaggagttagagactagcctggccaacacagtgaaacccgagtctactaaaaatacaaaaattagccaggcatggtgcaacgcgcctttagtcacagctactcaggaggctgaggcaggagaatcgcttgaacccgggaggcggaggttgtggtgagccgagatctcgccactgcactccagcctgggcaacagagtgagactccgtctcaaaaacaaacaaaaaaaccatagttatcagttgaatactgccattagcttggaaagaaaggggcacattttcaggggaaagacaagtacagatttggacatacactgagactgcaagaagaaagaaaaaaagatgatgcaaaggcagcttaataagacttggatgttaagatgttgcttaagtgtttgcttagatgtttaaaaaaaaaaagggtagagaaatagatactcacagcccggaaattagagcatggagagcactcttctgctaccacaaactcttccaccagccagcatggcaaatttgaggtgcttgctgaaaggaaagataaatgccagccccaggccattcagaaaacatttctcccaggctctgcccatccaacttcccggcacagcgcttgccctcattccatgtggtgccggccttttccacctgtgctcttggtatatggggaagatactaaaaccaaaaacaaacgacgggacgtgtcgggttcccagacaatcacccacctgacagcttctcttcctgcacgggagcctctgcttggctgtagcggagttgggggaagggacaaaagtcaaaacccagaaaatagggcaccccctcctgcgctgtccatggataagatctcccccagccccgaggccgggaacgatcctgtcctccagtgacctccttttccctccccttacctcctccttaccagagctttaaggtgaaagcacagagcaaccagcagaggtggcggccctgggggaggccaggcctcccggcacccgcaagcatggagcgccaagtgtcgcacctgtcggaacagagggacctactccacaggcctcgtgcctccgtcggagcgcagaggcggcacttactctgcagccctcccagaggttccaggtcagggcagggaaggccggagttgcctattggagcagaggatctatcaggacgtccccgttgccacagcgagaaaaatcgatatgtttttgcgggctagggaggcgagcgccttctgcggggtccgcagggcgctggaggaagggccggcgggggctcgcggccctagcgcccgctcacctccgctcccgcccccgacgcagccatctagccccgtggaggatcctcgggcgcgggaccgagctcggggcccggtgttcccgggggcgttcggtcgtcgcccgctggggcttatagtcttccgcgtcggtggcgcctcgcctgctgctcactgggaattagctcggcgccccgttgcattgtggtcttggtagtctttgcgagaacggcaaatggcggttgcagaggctcgtccgaattctcggctcgctgctccctggctggcgcgtgtttgttcattctgggctaggtgagcagggacaatacgtcgccctctcaggactttgctctctccttaaaacccgaggattcaccgtcaagcttctggtttctctgacatccttccccagccgccccttcatcgccaccgatgatccagtggagaagctgtgttggaggtcaagggatggaggcgaaactgcgcgttctcgtccctgcagaaaccggaatatccgagacacatgacgaacatgaaactttctccttgtctcttggctcccactccgctacacagatgaacggtgttaccttccctcatgttactttgctaagcctactcctcagagctggtcctttgcataacctcttcaaatgctctcaactctcccttgctcctacataatggagtaatcataagtgcaatgagaaaagcatgagatttgaagttccataagtattgagtctaggttctggtggttattaactccatgatcttaggaaagtatctgtcagtgttctgtgtaaaacggaaatgctaatgtgtatttaccaggactttttcttgcgagaggcagatgaaatgtatctccgtttcatgagtaagttcagagaatataagtgacttgtccaaggtcagcaagctaatgagtgggaaagctgaggcttgagcctagactgtcaacacccaggccaaagattcattgcctgcttttcatcttatggagttaaaccttgatacacactcagatctgcagtgacttgaccagcactgtgggttcatgctttactgtctgataacgaattttcatttaattttattttttttcttagacagggtctagctctgtcacctaaacctgatgagggctgagccttcatttcgccgttttttgtttgtttgtttttgtttttgaacgagatggactctggctatgttgccagactggagtgcagtggcaagtcacaggagccatcatagcgcattacagcctggaacttctcgtcttcagggatcctcccaagtagctgggatttcaggcatgtgccaccatacctggctctaattttgaatttgtttctttaaattattatttgtgtttgctgaaattgtgtgtgtattatttttgtgtatgtgtgtgagtagttatatgttacataaagtaggttgtggggttttttccagtaatgtttagctataattgaagtttgggccgaaatctgctagtatttgttactcctcaccaaatcctaccttatctcacaacaaactgtaagatcttgtgatatttcacttccaataaccttaccaggcatcagagtggggtctctactctgaaattaaatatctgccataaggta

SEQ ID NO: 488 - DNA, 391 bp, Homo sapiens
tgagacgtatggctgcctttgggaagctccttgtatgagaggggacagaacctgagtctgagaagcagagctcagaccctaagggagaatgggccactgccccagggagctccctgaggttgacgggcaactggataacacactctgctaaatggaagttaatgactgaaagtgaatcatgtgcttgctgtaaggaaattatgcaaacttcactgtagtgagttctttcaggttctcttgggtatggggagacatggaccagaataagccttctctagcttgctcagagtgccaaggtcctcagtgtctgggtgaaggatatgacaataccctcctctctcccttcttggcctcaggatgtccctttggcttgatctagagcctgtctgaa

SEQ ID NO: 489 - DNA, 469 bp, Homo sapiens
actacagaactcaaacacagctgggcgcagtggctcacgcctgtaatcccagcaatttgggaggccgaggtgggcggatcacctgaggtcgggagttcaagaccagcctgaccaacatggagaaaccccgtctccactaaaaatacagaattagctgggcatggtgccatatgcctgtaatcccaggtactcgtgaggctgaggcaggagaatcacttgaacccgggaggtagaggttgcggtgagccgagatcacaccattgtactccagcctgggcaacaagagcaagaattcatctcaaaagaaaaaaaaaagaacttaagcataagccacaaataaggtttatcattacctcatcaatgcttggatacttacatttatcaagttattacattttgctgtgtaaaaaatattatgtatggtgaaagggggatatatatatattatgtattaaaatatgtattatat

SEQ ID NO: 490 - DNA, 1413 bp, Homo sapiens
gaatggaacgcctgtttaaattaattctacaatatgtttcatgatgatgttatgaatggtgatttcctatctttctatgctgatattaatctgaatcggggagtttattgattttaaatatagccctacaaaaataactcagactaataaaatcataaatcatatgcgtgaatggatattatccatatagtgaatttgtgatgatgaattcatctgtgctaaaaatgttagtttaataaaatatgaaagtgacctgtaataacagttgttgttgattgagaacaaataagtttatgtgaaaaatatataaatacattagctggtcttgtgtgtcattttatttttttttgttgctaacacagggatatgaacaataactaaaagggcactttatatgagcggaaaaccagcggcgcgtcagggagatatgactcagtatggcggtcccattgtccaggttcggcaggtgtaagaattggcgcgcccaccggcgtggcgtgctcggtgtgtccgggcgggatgacttcgggcaacccggtaaatccgctgctgggggcgaaggtgctgccggcgagacggaccttgcgctgcccggcccgctgccgttcattctctcccgcacctacagcagctaccggacgaagacgcctgcaccggtgggcgttttcggccccggctggaaagcgccttctgatatccgcttacagctacgtgatgacggactgatactcaacgacaacggcgggcggagcattcactttgagccgctgctgccgggggaggcggtgtacagccgcagtgagtcaatgtggctggtgcgcggtggtaaggcagcacagccggacggccatacgctggcgcggctgtggggggcgctgccgccggatatccggttaagcccgcatctttacctggcgaccaacagcgcacaggggccgtggatactgggtgttctgaccggtgccggtgctgaggacgtactgccagcgccgctccgccgtaccgggtgcttaccgggatgcggaccgcttcggcggacgctgacgtaccggcgtgaggccgccggtgacctggccggggaaatcaccggcgtgacggcggtgccgggcgggagttccgtctggtgctgaccacgcaggcgcagcgtgcggaagaggcccgcacctcttcgctatcttcttctgacagttcccgccctctctcagcctcagcgttccccgacacctgcccggtaccgaatacggccccgacaggggtatccgcctttcggcggtgtggctgatgcacgacccggcatacccggagagcctgcccgctgcgccactggtgcggtacacgtatacggaagccggtgaactgctggcggtatatgaccgcagcaatacgcaggtgcgcgctttcacgtatgacgcg

SEQ ID NO: 491 - DNA, 138 bp, Homo sapiens
tggctgatgctcgacccggcatacccggagagcctgcccgctgcgccactggtgcggtacacgtatacggaagccggtgatctgctggcggtatatgaccgcagcaatacgcaggtgcgcgctttcacgtattacgcg

SEQ ID NO: 492 - DNA, 138 bp, Homo sapiens
tggctgatgcacgacccggcatacccggagagcctgcccgctgcgccactggtgcggtacacgtatacggaagccggtgaactgctggcggtatatgaccgcagcaatacgcaggtgcgcgctttcacgtatgacgcg

SEQ ID NO: 493 - DNA, 1469 bp, Homo sapiens
gtaaataaggggctgttcttggttgaatggaacgcaccttgtttaaattaattctacaatatgtttcattgatgatgttatttgaatttggtgatttcctatctttctatttgctgatattaatctcgaatctggtggagtttattgattttaaatatagagcctacaaaaataagctcagactaataaaatcataaatcatatgcgttgaatggatattatccatatagtgaattggtggatgatgaattcatcttgtgctaaaaatgttagtttaataaaatattgaaagtgacctgtaataacagttgttgttgattgagaacaaataagtttatgtgaaaaatatataaatacattagctggtcttgtgtgtcattttatttttttttgttgctaacacagggatatgaacaataactaaaagggcactttatatgagcggaaaaccagcggcgcgtcagggagatatgactcagtatggcggtcccattgtccagggttcggcaggtgtaagaattggcgcgcccaccggcgtggcgtgctcggtgtgtccgggcgggatgacttcgggcaacccggtaaatccgctgctgggggcgaaggtgctgcccggcgagacggaccttgcgctgcccggcccgctgccgttcattctctcccgcacctacagcagctaccggacgaagacgcctgcaccggtgggcgttttcggccccggctggaaagcgccttctgatatccgcttacagctacgtgatgacggactgatactcaacgacaacggcgggcggagcattcactttgagccgctgctgccgggggaggcggtgtacagccgcagtgagtcaatgtggctggtgcgcggtggtaaggcagcacagccggacggccatacgctggcgcggctgtggggggcgctgccgccggatatccggttaagcccgcatctttacctggcgaccaacagcgcacaggggccgtggtggatactggggtggtctgagcgggtgccgggtgctgaggacgtactgccagcgccgctgccgccgtaccgggtgcttaccgggatggcggaccgcttcgggcggacgctgacgtaccggcgtgaggccgccggtgacctggccggggaaatcaccggcgtgacggacggtgccgggcgggagttccgtctggtgctgaccacgcaggcgcagcgtgcggaagaggcccgcacctcttcgctatcttcttctgacagttcccgccctctctcagcctcagcgttccccgacacactgcccggtaccgaatacggccccgacaggggtatccgcctttcggcggtgtggctgatgcacgacccggcatacccggagagcctgcccgctgcgccactggtgcggtacacgtatacggaagccggtgaactgctggcggtatatgaccgcagcaatacgcaggtgcgcgctttcacgtatgacgcg

SEQ ID NO: 494 - DNA, 105 bp, Homo sapiens
tggctgatgcacgacccggcatacccggagagcctgcccgctgcgccactggtgcggtacacgtatacggaagccgtgaactgctggcggatatgaccgcacaaa

SEQ ID NO: 495 - DNA, 140 bp, Homo sapiens
tagtcccagctactcgggaggctgaggcaagagaatggcgtgaacctgggaggtggagcttgtagtgggcagagatcgctccactgcactccagccagggtgacagagtgagactccatctcaaaaaaaaaaaaaaaaaa

SEQ ID NO: 496 - DNA, 115 bp, Homo sapiens
ggctcaggcaggagaatggcatgaacccaggaggcggagcttgcagtgagccgagatcgcaccactgcactgcagcctgggtgacagagcaagactccatctcaaaaaaaaaaaa

SEQ ID NO: 497 - DNA, 35 bp, Homo sapiens
ggtgacagagtgacactccatctcaaaaaaaaaaa

SEQ ID NO: 498 - DNA, 166 bp, Homo sapiens
ggcgtgcgcctgtagtcccagctactcgggaggctgaggcaggagaatggcgtgaacccgggaggcggagcttgcagtgagccgagatcgtgccactgcactccagcctgggtgacagagcaagactccgtctcaaaaaaaaaaaacaaaaaaaacatgtaggcag

SEQ ID NO: 499 - DNA, 129 bp, Homo sapiens
caagctactcaggaggctgaggcaggagaatggcatgaacccgggaggtggagcttgcagtgagctgagatcgcgccactgcactccagcctgggtgacacagtgagactccgtctcaaaaaaaagaga

SEQ ID NO: 500 - DNA, 168 bp, Homo sapiens
cgggcgtggtggcgggtgcctgtagtcccagctactcaggaggctgaggcaggagaatggcgtgaacccaggaggtggagcttgcagtgagcccagatcgcgctactgcactccagcctgggcgacagagtgagactccgtctcaaaaaaaaaaaaaaaagaagaaga

SEQ ID NO: 501 - DNA, 57 bp, Homo sapiens
ctgcactacagcctgggtgacagagcgagactccatctcaaaaaaaaaaaaaaaaaa

SEQ ID NO: 502 - DNA, 153 bp, Homo sapiens
cccagctactcgggaggctgaggcaggagaatggcgtgaacccgggaggcggagcttgcagtgagccgagatcgcgccactgcactccagcctgggcgacagagcgagactccgtctcaaaaaaaaaaaaaaaaaaaagaaagcagtggggcc

SEQ ID NO: 503 - DNA, 193 bp, Homo sapiens
cgggcgtggtagcgggcgcctgtagtcccagctactcgggaggctgaggcaggagaatggcgtgaacccgggaggcggagcttgcagtgagccgagatcgcgccactgcactccagcctgggcgacagagcgagactccgtctcaaaaaaaaaaaaaaaaaaaaaaaaaaaaaaattgactcctaatcaaaaa

SEQ ID NO: 504 - DNA, 132 bp, Homo sapiens
gaggctgaggcaggagaatggtgtgaacccaggaggtggagtttgcagtgagctgaaatcgtgccactgcactccagcctgggcgacagagtgagattctctctcaaaaaaaaaaaaaaaaaaaaaaaaaaa

SEQ ID NO: 505 - DNA, 170 bp, Homo sapiens
gccgggcgtggtagcgggcgcctgtagtcccagctactcgggaggctgaggcaggagaatggcgtgaacccgggaggcggagcttgcagtgagccgagatctcgccactgcactccagcctgggcgacagagcgagactccgtctcaaaaaaaaaaaaaaaaaaagactg

SEQ ID NO: 506 - DNA, 98 bp, Homo sapiens
tgtgaacctgggaggtggagcttgcagtgagcggagatcgtgccactgcactccagcctgggtgacagagtgagactccatctcaaaaaaaaaaaagg

SEQ ID NO: 507 - DNA, 147 bp, Homo sapiens
ggtcccagctactcgggaggcttaggcaggagaatggcgtgaacccaggaggtggagcttgcagtgagccgagatcgcgccactgcactccagcctgggcgacagagcgagactccatctcaaaaaaaaaaaaaaaaaaaaattgtg

SEQ ID NO: 508 - DNA, 116 bp, Homo sapiens
agaatggtgtgaacccaggaggcggagcttgcagtgagctgagatcgcgccactgcactccagcctgggcgacagagtgagactctgtctcaaaaagaaaaaaaaaaaaaaaagaa

SEQ ID NO: 509 - DNA, 87 bp, Homo sapiens
ccgggaggtggaggttgcagtgagctgagatcgcgccattgcactccagcctaggcgacagagtgagactccatctcaaaaaaaaaa

SEQ ID NO: 510 - DNA, 150 bp, Homo sapiens
ggcgcctgtagtcccagctactcgggaggctgaggcaggagaatggcgtgaacccgggaggcggagcttgcagtgagctgagatcgcgccactgcactccagcctgggcgacagagcgagactctgtctcaaaaaaaaaaaagaattggc

SEQ ID NO: 511 - DNA, 159 bp, Homo sapiens
ctgtggtcccagctactcgggaggctgagggaggagaatggcgtgaacccaggaggcagagcttgcagtgagccgagatcgcgccactgcactccagcctgggtgacagagcgagactccgtctcaaaaaaaaaaaaaaagaaaagaaaaagaaaaata

SEQ ID NO: 512 - DNA, 153 bp, Homo sapiens
gggcgtggtggcgggcgcctgtagtcccagctactcgggaggctgaggcaggagaatggcgtgaacccgggaggcggagcttgcagtgagctgagatcaccccactgcactccagcctgggcgacagagtgagactctgtctcaaaaaaaaaa

SEQ ID NO: 513 - DNA, 155 bp, Homo sapiens
ggtagcgggtgcctgtagtcccagctactcaggaggctgaggcaggagaatggcgtgaacccaggaggcggagcttgcagtgagctgagattgccccactgcactcccgcctgggcaacagagcgagactccatctcaaaaaaaaaaaaaaagaa

SEQ ID NO: 514 - DNA, 63 bp, Homo sapiens
ccactgcactccagcctgggtggcagagcaagactccatctcaaaaaaaaaaaaaaaaaaaat

SEQ ID NO: 515 - DNA, 142 bp, Homo sapiens
cctcagctactcgggaggctgaggcaggagaatggcgtgaacccggggggtggagcttgcagtgagccaagatcgcgccactgcactccagcctgggtgacagagcgagactccgtctcaaaaaaaaaaaaaaaaaaactta

SEQ ID NO: 516 - DNA, 154 bp, Homo sapiens
tgtagtcccagctactcggtaggctgaggcaggagaatggcgtgaacccaggaggccgaggttgcagtgagctgagatagcaccactgcactccagcctgggcgacagagcgagactccgtctcaaaaaaaaaaaaaaaaaaaaaaagggccgc

SEQ ID NO: 517 - DNA, 1548 bp, Homo sapiens
agcagctcttgcagtgggtgggcgacttcgtgctgtacctgctggccagcctacccaaccaggtgcgccatgctctcccctaaggccccgccccccacctgggcccccatctcatcaggaccccgcttccctgcccctgcccctcaaaaccacctcagccccgcccctagttggagtcccgcccctacttggagtcccgcccctacttggagtcccgcccctgcttggagtcccacctcagccccgcccctggttggagtcccacccctacttggagtcccacttcctgagtctgtctcttcttaaacccccacttcctagccctgccccacttcctagccctgccccacttcctagccctgccccacctcggagccctgccccatctcggagccctgccccacctcggagccctcccccacctcggagccctcccccacctcggagccctgccccacctcggagccctgccccacctcggagccctgccccacctcggagccctcccccacctcggagccctcccccacctcggagccctgccccacctcggagccctcccccacctcggagccctcctctccatgaagcctctgctgtaagaagcctttccttggccacacccttcctgcccattctcaaagccccgcctcccaggccctgctccttctcagccccacccctacacgaaggccggttcgccttgctcctgctgctgctgcccccaccccttaccctccccagctccctgcgcctggggtgggcggccttgaaatcaagtctccatccacacctccaccttcagttttgcggcttgtgcgcccctgaccagggctccaacctcgcccccacccccccgccggtacactctgtcctgccccagctgtgatttcttctgccccacccacccggcttcatcctgccctggggcccgcccttctccaccgcgcccatcacggacggtttgaagtccctctcttctttttgtggggctttaggctgccaggggccacccctggggcctccccttccctggtcctctcagctcccagtacagtcaccaggggcccgggcccgcagctgtaggagggggcggctgctcctccacgtgcaggtggggatattggcctcagccagagcctcgtcttagtcttgtggactctcagggatgggacgactctgcaaatggggctgtcctgggccctgcagggctctgagcagcgtccccggcatccacccactcggtgccagaagcaccccagtcctgaccaccacaaatgtcccagaccctgcccattgccccccggtcggggttccaccgaccccaagacacttcatcccatcgccatctgccccccgccgccccagccacaccgatgcctctttcgggcagggttccctgctgaggccgggccacagctttctgcgggacggcacctcgctgggcatgcttcgggaattgatggtggtcatccgcatctggggccttctgaagcccagctgcctgcccgtgtatacggccacctaggatacccaggacagcatgtc

SEQ ID NO: 518 - DNA, 129 bp, Homo sapiens
ttttttttgagatggagtctcgctctgtcgcccaggctggagtgcagtggcgctatctcggctcactgcaagctccgcctcctgggttcacgccattctcctgcctcagcctcccgagtagctgggact

SEQ ID NO: 519 - DNA, 131 bp, Homo sapiens
ttttttttttgagacggagtctcgctctgtcgcccaggctggagtgcagtggtgcgatctcggctcactgcaagctccgcctcccgggttcacgccattctcctgtctcagcctcccgagtagctgggact

SEQ ID NO: 520 - DNA, 3771 bp, Homo sapiens
tactcaccaacctttattaagtacattttagatactgggattagaagatgatgtcattagacatttctttggttttagcttctgtgggtttgatcaaggagtttattcagtattttaaatcttcccccaaatctggctttaactctttgccttaagagtgctttgtgtttgtttcttttacttagccctttgaggtggacctttctcacgtgtatcttgcctatactgaggagagtctgcgtcagtctttgatgaaactagaaagaccacgaacttcaaaggggaaagcaaggccaaagacagggagaaggtaaggactgtccttgaatctggtaaaacgaaggcattgaggtattctaattagatacatgtacaggaagttaaaatttatttagttaaaacatgatacatattttggctgatttattaaaaatcaaattcctggctgggcacagtggctcacgcctgtaatcccagcattttgggaggccgaggcaggtggatcatttgaggtcaggagtttgagaccagcctggctaacatagtgaaacgctgtctctactaaaaatacaaaagttaaccaggcatggtggcgcatgcctgtaatcccagctactggggaggctgaggcatgagaatcgcttgaacccaggagccggaggttgcagttagccgagatcatgagatcatgccactgaacttcagcctgggtgacagagcaagacttggtctcaaaaaaaaaaaaaaaaaatcaaattccttatgtattagaatttgagtaaataaaatctggccaaagaattaaggtcttccaacttcttaggcttctgagtaatagaatttatttttaattcactctgttatttccaaatgtataatgggtttaattccttaattcttagactaattcttcttatgaaatgctaattaatttgcctgtttggtctcccaaggtattgtattcagctggttagtttttctgtcaggtgccccaagaaccttgatttcctcagtcaccagctaaggagaacttccttggacatttccccctctcctttgggcactggttttgactgttgggtagtctgcgtgtatcatcacataagctcagggaaatcgggatatgggagtcctgggctggagcttatttttttttcctttccctttcctacatcaaggactgttcagtttatttaagctgattttaagactctggggctcctaaaatgtaggaaataataagctgcttttttccctactttgagtgcatggactttcaagttacatgtgggatgaagttgtacggttttgatatctttgtgttacataatctcatagacatgacttaacacttataaatttgggatggttgaactcagggttgggcaaacagttgaatattaaaaatgtacaaatttttacattctttagcatttaggtgaggggttaaaaactttcctataccaacacatgccaagcatattgtagtgaagcaaatcagttctaagaaacatgagtccctttagatgtatctttttttccatttttaataaaatgacagtgcaagtgtgatgataaatggtaagacatttgtccccagcgtaggagaaaaattggcagtggtgagcagtcctgtctaaagtgagtggctgctattctcttcctagttatctatggaaatagagggctcattgtttctggatcttctgttttcttttcttttcttttttttgagatggagtctcactctgttgcccaggctggagtgccctgagtagctgggattactggcacctgccaccatgcccagttaattttagtatttttactagagatggggttttgccctgttggccaggctggtctcgaacccctgacttcaggtgatctgcccacctcagcctcccagagtgttatgattacaggcatgagccaccgtgcctggcctggatcttctcttttctaaggaaaagccagaaattcgaattatttacttgagatctgtcaattttactttttttttttttaactatatggaccctaaagcaaatgaataaataatatgatatttgaatacgttttccagaacatccattttaagatacgtcatttttttagtttaacattaaaaaaatcgtgtggcccaacattatatgagccaaactcaccatctctgtatactggaattggcctgctataaccatggaaaccctaagaaaatggtagccataaacatggacaaatacatgcattaaatggtttattgatgctatgttacattatatgatatgttcaatgtgatgttccttgttagaaacacatagttagatgggctaggcaaaattgcaataaatataatacattaatgtagcatttccataagtccctacatatgcatcaggtattgcctgagatgatttgtttctgatttcctctgaatccacttgcaccttttgagtacctcagaagagataatcaggaagttcaaatctggcaagcatgcagctcacttggcctggccacatgacctagtctagtcttggaaattatcacctgtcctatccttcactatctggcataatggggtgggctgccatcctcttgcatttactttaagttagcttcccgtagcctgaaaaggcgagcattaattgaacacttaccatggtcaaacgtgtcaaattttggcttgtttccagactatacaggccaccccatagtttctatataatgttaaatgtttgcatttcagtcttttaggaaagcattcatgattgctttttttcttctccaaacagaaagcgttctgcaaagcctgaaactgtaattgactctttactgcagtaaatgttacagacttaaagtcacaataaaaattagtgatattctcatgcctggacaaaatctttaattaaaacagtgaagacttctctataatttcaattaatggaagttgtagatcaatgaataagactggaaataataatttgcttaagaacttttagtctacatatattaatataacattaaaattgtacaactggtgattgttcaaattgttgtactactactcttcaattgtactgtgcagggaagttgggggaacagttcatactatagagagttacagtttagatgtatgtgtaaatcgattagctatttatccaactactgtatatttaggtaactagaatttcaaaatagaaaaaaaaaaactgtgtcctgttttgcacatagaaagaagcagatcagattgtcctatgttgcgctgttatatatgaatgtttggactgtacatctaaagaatgattccgtcctaacacccacccagcctgtttgaacacattctaattgtctaacatttgttgcattttaagtatgagatgactgatcttatgaatgttttgtagaaaatgttataatttaacagtctttgcgagtatacatgttttttaacaagttgaaaatgtttcatctgaacctttcctaacttttttttgccagtttgagttcaaatcaaatacaccttaagttctggtttcatgttctcttgaaacattgaattgtacgtaaatataaaggatctactgttgcggaaaattaagaagctaaatactgctcagttatctttgcctgcgtgtatatttttaaaaattcactctgaagtgttatggatgcttttctttgagttctaaattttggtgggaattactttatgtctcccagttaagaagagtctccattttccagaaaatacagctaagcaagaaa

SEQ ID NO: 521 - DNA, 8736 bp, Homo sapiens
agaggacagggccctcaagcggggcttccaggaggtgagtgtgcgctcaggccgagggaggtggggcctccagcagtggccccaggctgctctgagcacctgtccttccaggtggatgagttgttccttgaggacttccaggccctcccccacgagctcttccaggagtttgactaccagccaattgctgccgccagcctggcacaggtgcacagagccaagctgcacgatggcaccagcgtggctgtgaaggtatatgggggctgccttgttcagcagtgggctggggcggggcacagtggggccccaagttctcaccacaccctcgcccagtgcaggtgcagtacatcgacctgcgggaccgctttgatggggacatccacaccctggagctcctgctgcggctcgttgaggtcatgcaccccagctttggcttcagctgggtcctccaggtacagccccaccccttccccggccagcaggagcaaacacgtatgcagagctggtaggagcagctggtaggcaaagctggtcttcaaccgccatctggcccccaggacctgaaggggaccctggcccaggagctggacttcgagaatgagggccgcaacgcagagcgctgtgcgcgggagctggcgcacttcccctacgtcgtggtgccccgcgtgcactgggacaagtccagcaaggtgggctgggccaggcccttggggtgggcacagcgctgggcctgctgagcccatcctcttgctctccccagcgcgtgctcactgccgacttctgcgccggctgcaaggtcaacgatgtggaggccatcaggagccaggggctggcagtgcattacttgagtgcgggggggcgggggcgggtcaggcgggctggtgctgtgtccactgcaatgcctctcctctccccagatagcaaaaaagctcatcaaggcctttgctgagcagatattttacaccggcttcatccactcggacccacatcctggcaacggtaggaatttaccccaggggtgggggtctcggggtgggcgcaacgcgacctaagaggctgtatccctagttctggtgcggaaaggcccggacgggaaagcggagctggtgctgctggaccacgggctctaccagttcctggaggaaaagtgagcgcgggtgggtgggcgtggggcagggcaagcctctcctgccgcagggagctcatggctgcgggcccatccacacccagggaccgcgcagccctctgccagctgtggcgggccatcatcctgcgggacgacgccgccatgagggcgcacgcagccgcactgggggtgcaaggtgagggggtgcaaggtgagggcgtgcggggatcgctggggcaccacagaagggagtcgggcggcgcagaacccactcagagccccctccctccctccctccctccttccccagattacctcctgttcgccgagatgctcatgcaccgccccgtgcgcctggggcagctgtggggttcgcacctactgagccgcgaagaggcggcctacatggtggacatggcccgcgagcgcttcgaggccgtcatggcggtgctcagggagctgccgcggcccatgctggtggtgctgcgcaacatcaacaccgtgcgtgctattaacgtggccttcggcgcccccgtggaccgctacttccttatggctaaaaggtcggtggcccgaggaggcgcccgggccgtggtggggctggtgtggggctgacgcggcgctaacgcgggtgtgtgcagggttgtccggggttggagccgcctggcgggcgccacgtatcggggtgtttacggcactagcctcctgcgccacgccaaggtcgtctgggagatgctcaagtttgaagtggcgctcaggtgagtggccgcggggcaggtgggtggcgggggcctgctccccacccacctgtgacctgtgacctgacccacgcaggctggagaccttggccatgcggctgaccgccctcctggctcgtgctttggtccacctgagcctcgtgcccccagcggaggagctctaccagtacctggagacctagggtgcagccgcccagggccggcggggcccttttcaccttgggctgacggaggtggcggggctagaggtgtagacaccccgagccccgtgggcactcgcactggggggctgtgacagcagctgggccaggaggccgtgtaatgaccacacactcctctcaagcaaaaaatgtttttccttgtgttttgtacaaaaagggggtgggaggtagttccgtgtgctggtggtgacggcatccacggggctagaaatgggcggtgacgcggtccgtctccagcaagtcgtccaggatctgcaggggatggaatggtgggtgggtgggtgggtggggatgcacacggaggggcggggcgcgcggggggcggggcgcgcactcactatgtctggtgtggtgccgatcttcttggctacctcgctgcgctccatggtgctcaggaacaggtagcggttgagcagctccccatccagcacgttgcgcacggcattctggagggtgcggcggtccacgtgcagcatcctggggcgtacaggcacaggtgtcagggcaggctggggtggagggggtgctgcacgcgggcggggccggggctcaccggaaggcgcgggggttgaggccggcgtggtgtggcagcatggtggtcagcgcgttctgcagcatcagcagccgccggtaggtcttctcctgcatgggcagcagcagcccgatgccgccgtccagggtggctggcaggggtagggtgagggttttggtgtgagccaggccaaccctagggccccccacccagacacacctgctcccccacactcaccaaaccacgtgatgtgcttattctcccacacgaccgactttttgctgagcccttcagtggccccccggcacggggtcctccaaaacgtgttcacgtgggcacccacgtggaagtctgcccgacgcagcaggcgcatgcccccgaaactctccttggctagaccagaaaggcctaggggtcactgctagcccagccccggcccaggcagagggggtggaagaagcactcaccttcgggcaggtacatgtacaccatgaggttgcggtcgcggtcagacactggggagcagaggcccagggtcagccccggccacccccagagcctcagctccccagggccctgcccacatacccagaaaacccagctgggcattgtccaccatgaagtccacgctgtacacctccaggggcttggcatcctgggggcgggaagggggcgtcagaggtgccttgggcgggtacccacccagacacgagcaccgccgccacaggtgtacccgcgacaccaggctcagcgtcttgctttcctcctggtagcgcagcagcgaaatgctcttcatgacgtcggctgccaggatgaagttcttgacgctgatcatctggtgtatgtagagctgcgtgtcgatgaaggccatgcccgtcagctcgctggcccgcaggctccacaggaaaatctgggggcgaaggcgatggtgagcgggcgcggacggggagccgggtgagggtgaaccgggggacacacgccgggtgggactggcacaccttctggccgatggccgacaccaggtggccattgcagtggcacagggcggtcacgggccccttctgctccttctcgtaaaggactttgaacttgttcttggtcaagggctggccaggctcgggcaccacctcaatcacatccatgatcaaaatctggagggcatgggtatggctgtgggatggctgtggggatggcagaggggctgccagttcccgcccccgctcactggccccttacccgccctcggcacgtgacctcctccccctgcatgaggcaggtcccggcggccacgtagcctttgaggcccgacacggtctcctcactgcgcagagacactgtcttcatgcaggtcacatgctcccactcctgcagctcgatcctgtgggggccaggggcctcaggatgctgcctggaggccttgggcagaccccacccccgccggcccagcctcacctggcattgggaatagcctcccagctgaccggggagatgagctggatggagaaggcctcctgctgggggtggatgtaccgctcatctgtggggaccaagggtgacagtcagagtagggcttccccaagatgcggctgaggatgggagtatggtgtgggcgtcaccacctctctcgatggtctcaaactccttctcctcgccagtcatgcgtgggatgcgggcacacggcgtgttggtgctggtggccacagcatacacctgtgggttagtgagggtcacacaccagtggcccggccaggcccaaaaggtccctggtggggtgggggtgggggcagaccttagactccacgtggtaagccacatagtgggccgtgcagcgcagcgggatcttcctgacaggccatggggcatcataggacaggtaggcaggcaggacactgatcctcagctcgccctggggtgggggcacaggggtcaggggatccagggctagccaagggcaggggcaggcaggcccaggccgccaagagccctgggatgttgccctcagctctgtgggagcaggggtgggtgaggggcagctgtgtcctggcgaggtcctggaaggggctgccactcagcctctggggctcctcctgtccattttcccacgctcagctggggctaggggtgctggccacaggggatgggaaagctaggccaggagggcactggaggctgcaaagggcagcccacagactgccatgctggggactgaaaaccaggcagagggagccagggctgccctctttcatggacagtcctgagtcctcaggcacccaggaagcactcaccgcatcccaggcagggtctcaagtgacctggtggtgtggtggcttaaatagggaaccaggatgagaaagcctgtgtgccctcccaaagtcacagagcagccaaggggcagagctagcactcacgtcagctctcctgagaagtgtggaggccaggccctgcgagggcttgcccggcgagccggcagagcagtggtggggaccccaggggatgcagccccagttcccaaccacccctttccagacctttggagcaaccaagtcacaggttccacttcgttgacctcaaccccatcgccctctggacactctttcctggtcctcagggtggagccaatggtcccttatcctgtcccttccccctcagcccccagctggggcagcatcagccagtgttgttgggaaccggccggaccccacctgtctgttgaagtacaggaagccgcggggacagttgacattgtggaatggagcgaaagagtcgaccgggctgtcgatggccatggggtgtagccgcagagcccctcggccggtcaccaagagccagtgaggggaggggccgcagatgaagacctgggggcaggcaccgtgaggatgctgtggatgaggatgctgcggatgaggccgcgtctcctttctaccacagacccctgcaaaggcgctggcctacccctgagtagccataaatatcctcgaagtagcggaaacgcgccaagaggccccgggccccagccccctcctctgcgccgccaccttctgctttcttcttggatggctttggcttcttctcacggaagttgatgttgtgagggacctgggggggaaccatgcaggtcctccaggggctgccggtctgaaacccacaccttgtaccacacccaccccacgccccagcagtccagccactggcaccttcttaaagcggactttgagattgccctggccgagctgagagtcgtgggggaaggcctcgtatataagcagctcttggtccacatgcacctggcaggatgaggggagccatgggggaacgggcagggccatggagaacatgggatgggccatgggaagaggtgggctgtgggtaaggggcggggctgagatggggtggagccatgtatgggaaggggcggggctgtgagggaaatggggtggagccacgggaaggggcggggccgtgggggagatggggtggagccacgggaaggggcggggctgtgggggaacgggcagggccagggggaagatgggaaggggaggccaggccaggcgcactcaccagcaggtagggcctgctctggcggctgcccagcgccaccagcagcacctccttgacgaggggcagctccccctggcgcgtggcctcctccctgcgggcctcgccctgtgtagtgggctgtccaaaggagctgtccacaaggacccgctgccccacagggaagttcttcaccaggaacaccagccgccagtcgggaagctggtagatctgcagggtgggcagcagtcagtggaggcaggtgggtggaacccgctgggccacagtgcagggcaccacctacctccatggtgccattctcccgcaccagcaggcaccagtgggtaggctctgcccggaagggtgcagggtcccggtcagcagggggctggctgcttcttcgggcctcctccttgctggggctgaaaaaggagcccgaatccccatacagcatctcctcctcttcatccactgtggggcggggggccagcagaaagttttgggcggcctgccagccccaaggactcaagcccctacctgcgcccccagcccccacgcacctagtctctgagcccaggccctcggcctccgggccactgcggcccccgagctcgtcacgggccccacccaggcggctctcagtggtgaacatgccgctgaggtctcggtacaggcacagcgtaatcaccttggactgctgtggggagaggggtgggctcagcggcgggcaaggggcagggacaggagggcgccgggaatgagggggcctacatggtgcagcgggggcttgtgcagcgccaggcggtggtggcggccaccgtatgagtcactcttcagcaggaacatggtgacgtggccctcggcactcatgatgaccacataggggtcggccacggcgcactgcacgatgggggcgcccaagtccacggggataaattgcagctgattcactgtaggcatggggcagtcagcatgcgcctcccccccaccgtccccacccacctacctccttccagcaggcggatgcccagggcccaaccacccccccaccaacctccttccagcaggcggatgcccagtggtgacacttggacaatgtagcggttgtccccgatgttcccagcaaagaccgtggggccctgagtggcgaagccactggtgtccagctccatgatctcctgccccgtctgcaggatctgcgggcgacagctgtgagggaggcgccccccgcaggggaccccagccccaggtcccaggtcccaggccctgcccctcaccatggtggagtcttcccggctcagaatcaggaatccgtgtctgcggccgtcgtcgtctgcttcaggggtggtgctgggttcctgctctgtgccctcccccttgggattgtcctcctgtcagggccaaaggggggcacggctggaagccacagtccagtgaaggcaggcacgcaggtgcgacctgggcacccccggcctatgagaaggcagcgccggtcccatcccagggcctccctgcagcaagctcgcacctacctcctccttacgcaccggggcgatgactgtccacatgtcatagcagccgggaagctcaaatgttgtcaccacctggggccggaagatctttttagaatgatgatggggtgggggtgtgatgggggtgtgagcccacccaggtcccaccaggaggcgcccgccccctacttgcccacacacctgcagcaccgacaaagccccgttcttcccgtggccggagcaaaccacaatctccaggtccggctcggggctgttctgaaactgcacaggactcgggggtgaggagtatgccccccaccccccctcacactccagcccatgcccccagccccgaccccaaccctgggcacctctttagagaggaaggcaggtttgcccacggcggcattggcacagggtccaatgttcaggatgctgtcacacacctgcggcacagcaagagtcaggggcccgctgggggcgctggctgggacgggggccctgctgcctcaatctcacctcaaaggagtaggtggccagctgtgttcccgactgggcctcgctgccgtacacttcaatctcgtccacctcatcctgcggcaccgacttacccgcagctgcacacagagagcccacttgagcgcagccctgggtcacctggccccgctcctgaccagccctggaccggccctcacctgaccagccggccgtcgcatccactcgcttcttctttgagggaggctcttcctgtgaggcaggaggggcactgagtggcatgccacagcagtgcccacatgaagggtggtggcccaatgggcccaggaaacccaccttgtcggcagcctcacggacagcactggccgggggctcctgcagcttctccgtgtacttgaggaggagggaattgcccaggcgagaacccaggaacaggtacccgggctccatggtgaccatctgagggagggcaggtgtgtgatggctgggccgggtctggacccagacccaacccctattcccaactcacgctggtggtgaggacgctggcggccgc

SEQ ID NO: 522 - DNA, 524 bp, Homo sapiens
tttgtgaaatatcacacttgttgagtgcccactgtgggtataattttattctgggttttctaaactgaagaattcaggtttaaaattcagaacacctctagaaatacagaaaaatgtctatttctcaaatggagatatcaatagcaactacctataaaatagctctccctcaaaaaggtctttcactaaaaacaagtacaaaagaaagcatcctttttcagcagtaggaacccacaagatcttgttctttgattacaggattgaaaaattcacatttgtacacctagcactgatttcagattcatagtaatgccatctataaaaattacaatttcacatttcagaggcctgccaacctggatatctatgcttaaaaaaaaaaaaaaactatcaaaagcaagtaaggaaaatatagcttgtccttaacacatttctaaggtattatgcaaaggaaaataaaaattgtttcatagaggtttctacttctttcagatcaaattaataaagtctctcttaatcacagc

SEQ ID NO: 523 - DNA, 7175 bp, Homo sapiens
acatttcacttattaaggttttaagtgaattggaaaggcatatattagtaattagtggtaaatcttagacaccaaaaatttaaaaggaaaatagtaccaaaagtgtagctgttaacaaaaaactacaacactgtaactaccccaaataaaataatgaagcacatactatccaaaaaccatcaccataatccagcaagttccaaagtgatccctgaatttacctactcatctgtcatgaatgtttatgtttctctatgtctactggatcaaggaatcttaattctttttcagtatattttacgtgaagagtagacaattgttactcagaattgggcctttcatcatttcactagtggtccctaactccattaaaataaataaatatatatgggggggtggggaagatgagaaaaaaagagttagtgagtcatatttaccttatgtgagacctaatctaaaatttgccaaattcagggctgaaatctgaataggtgtataaaaagagttgttactctctccttcatatgtataccccatttcttgaaagaaaaaccttaaatacatttctaggttaaggatttaaagctgccaaactgccattgtacaagaggctgaacagacagtaggcagagtgaccagtttctaaactttgccctcaagggatacaggttcagacacatcaaccaagcttgaggcaacaattcagaactggtgacaccagcctttgtaaccagaaggcaactgtttttctgaaacttcagaaatattcaagctggaaagggtgaaatttgtctttaaaaaggaatattcaaaaactttctgatcatattaagacagaatataggcagagtaacattgtagtgctgttggtatacctttttaaaccaaatttatttctcttccttgcttactaactgactcctgccccaaagaagattacatagaaacagtctttatactaatctatgttatggctttgctttgctattttttttttttttttttggtctaagtaagatattagggctcgtgtttacaaaagtaaatgaaaggatcaaataacatgattaatacattttattacaaaggttttagaagatgaggggcagagctaacaaattaccttaatcattaaaaaatcacaaagttggagaatttttttaaaaagagtggataccaaaatagcttttaggaagatgacagcttaatagtctcttaaattgctgaagagagcaaaagaaagcttaagatctggaggataaaagttatatcaaaaacatgctaaagaatacattaaaacaaacaaaaaggaaagaggaaaaaataaactatgccttagaagttaaatcctatcataaatgaacatcatttctaaaggactatggcccacttcaacactcaaacaaaaaaatcctcattgctaaaacagcttcaacattcctttggagtttgctgttaaagaatttatcctgcatatatggtagacacgaaacacatcctgaagagactcagaatatctgcaaacataaaactgcttctctaaattgcatttactggccttgaatccagtagagtagggttcagctatgacatgaagtgtgtcatcctggggagggggagcaatttgaagaaaaagggcactttgctacagttaattcacatggctataatagtctacaagtttctcctcaatgccaaatatctactaagaatttaaaaaagcagatgaaactttctatttccaagaattcatgtgataaagggtaatcatcacagagtttacatatgctcagttttcttaaagccatagattttattccagaaaggagaaagtacatggcattaataaaccacacatgccatgaattttagaacactaaattatttttctctggcttatcaaccagttatatccatgggctgcaaattatatccatgacaaaattgataacattttgcaacatgtcaaagaaagaccaacatttttgcctgagtgtcccactaatctttatctagagttattattcttggactttctacaaaagtttcttttcaaataatttatgaattacaacaactggaaagaatactgtgagaacctgaatacttcaatcaaacactgaaggcaacaatcttcctctttaaaccatctctcctgcctgaatttttatatactaaaataaccccactccttcatttctgcaggagtagccagaataaggtggcattccttggccgtcacaagtcccaggtcaaaacatctccattcttcaatgttctaacaaaggtttctggccctgcagctcatgtgtgtgtgattcaatcttgttctcaatgagagagatctctagcacaggtaagagtagctgaaaggcgtcctggatgtaggaggcactgtttgatgcctgccaggattgaaaacacaagaaaaagaaaatattagttatttaaaagagaagatatactgtaaggcaacaagggaacagattaatttttgtaatctaactgaattcatagcctggcaagtaagagcagtgacttggccattttggtaaactctattatagggagaagaatttagctcttaagatgatatgagcaccaaaagagaatgtcagcattttgtacaacttgcccatcagacatggtagcttttctttggcaacatggtcagacttggcattcaaagcttatttattcctttattgagtagggtagattctgtcacaatattgtggtcaattactgaaagaggctttcagaaggctataaatcctacacctatagaatttctagcccattatgatagctctttttccatggactcaatgcgatcagtgagcacaataactgctcacacacataaacatctttcacacatatactgctttcaaagatgacagtatagatatatttctatcttgaacaacatttttcagaagtgttagagaatcattaccctcagtttgctggacttcatttatactgaaaagccctcacctttcaaaagaatatcaacagagagctcattaagataaaaatgtataatttcgaagacaagagtgtttcaaatctgtatgcaaaaaaaaaatccactaaaaataatagggagcccatatcaagtgatattacctttttaaaatttatcaatggcaagtactatttaaaattcagtgtgacatttaatactcaatttcccacacaaaagggacctcagatatcgtctagttaaatctcttatgttgcacatgaaaataacgaagtttgtcagagtcacacaacaaatcaaggaagatccagggcaacacggggctcctggtttacaaagtcttttctactgcaccactctgccgtttactaaatcacaaacttatatttttaaaaattattacaatgatcaaaatagtttccctgactacttgattaaaactgtgtaattaaagaattaaaatcatttccttgatggtaatgtcaaaagaatttaaaactagagaagtaagagtttggtagttaaaacattttttcaattaacatctaaaacttaactatcaaatatattttctccccccagacttacataaacatgttttaaacaaatcatcaaaaagtctatgttgtctgcacagttagtttacaaggtagagttcttaaaacatggaatccagaaaacatcacatagggaggtaatataatcagtcacaggatcctcttttccattgacttaaaccatctaccttctcaaatctaatggaatgatgaggataatgtaaacactacctttctgacaaaacaaagcatgatttcctggcaaggaaatgacaacatgttttgttttgtaacaaacctctgcataaactttagtcctaaattaggaagcagtgcttacctgtttataattttcagcccttcatgtttaccagctggtattcagaaggtgtttcattactgtgaaccgtccattaagctgtcaaggattagtactaagtaatgacaatctactgcttcttccagtaccctgcagcttcaactgtatgctttctaattaataaggaaggaatacacatcaaatatacactatttctgtcatatctacatcaatatggctaaactaccaatatggtgaataaaataaaaaagccaaaagcaaaaggcttcagaagagttaattatacgtaatacctttggagtcagagacttaaaaacaattactaacctctagaaatactgcagtgattaatgggttaaggacatctgccatttctttgacctggaataacgaatacatttttaagtgagcagagtaggttaaataacagtaagtggagtacgatcacactttaaaacacacacacacacccatacataaatattaaatataagcacagaagtctggactgagagcaaaatgtcatctttagaatggaaattctaagtgttttaaacttctttcttaatatctttctgtgctatccatattgacagtgtattgttttatacctttttattgactttaaaaggtatcttcatttgaccacaaaaccttagaaccattttaaaacaaaacatgtagatatggaacatgtgctcaaaaaactcaagggtctttaacacaagctgtttagaaaagtcttataaataaataatgtaaatttaatacttgtatgtgtcagcatcttatagttgatatgctggcttaaagtatctatatggaacacacagaaagatttggccttgtaagattaacttcaggaaacccagatcctttgtcaagaaaatactacagggaaaagtgaagctgtaccaaaagattatcctttacaggaataatctaaactcaaattttaaaaaattaacttaggccatggtcttaattaaaacaaatgtaatgttcatgactagggctttaaaataaataaataaataaaatttaagaacccacagtaattttgctgctacactgacactgatatacttactataaagtaattttcatttgcttgtttaaaatgctcttgattttatcccaactcattattactggtttctcaatcatcttccatagctcacacatcttcataaatttttacaattccaatttttaaaatccccaaaagactttagctttaactacttctctcccaccggctggcaactgcatactgtgagcactgccatagtctaagtacagagttgctctttaaaaccagagtcaaaatctgaagtttgaattttatcaaggtctatatttccattataggtctcagaagatagcataaaaaatactgaaaacttcataaacagaagagaacaaaaattaattagaattagacatagacaagctgatcctaaaagtcatatgaaaatgcacaaggccccaagcagtcaaaaaatcttgaaaataagaacaaagttggaggacttacacttcttgattccaaacctactacaaaactacaatatcaagacgatatgacactggcatttggataaacatacaaattaatggactaaaaatcagagtccagaaacaaacccatatatctatggccaactgattatcaacaaagaagccaagagaatttaacggaggaaagaacagtcttttcaacacatagtactggaacacacggatatccatatgcaaaagcatgaagcagggccccctaccttacaccatacacaaaaattaactcaaaatggatcacagacataaatgtaagggctacaaccaaacttttagaagaaaacagaggagtaaaatttcactgcaaaggacacgatcaaaaagcgaaatgacaactcatggacttggagaaatacgttcccatcaaaaatctgataagaaacttgtactaggaaaattaaaaaaaaaaaaaaatctcctacaagtaataataaaaacacaaacaacccaagttttaaaacaaataaactgctgaaatagatatttctccagagaagccagacaaatagccaaccagcacattaaaagatgttcaacattggcgctgggcacggtggctcatgcctgtactcccagcactttggaggccaacgcaggtggatcacctaaggtcgggagttcgagaccagcttggccaacatggtgaaaccctgtctctactaaaaatacaaaaattggctgggcatggtggcaggtgcctgtaatcccagctacttgggaggcagaggcagaagaatcacttggacccaggaggcagaggttgtagtgagctgagatcatgccattgcactccagcctgggtgacaagagcaaaacttaaaaaaaaaaaaaaaaaagtaagaaagaaaaaaagatgtacattagggaaatgtaaatcaaaaccacaatgagatactatttcatacccactaggatggctaaaataaaaacaaacaataagtattagcaaggatacgaagaaactggaacccttacacactgctggtgagaatgtaaaactgtgcagccaatttggaaaacagtttggtaattccttaatgacccatatcacccatatgacccagcaattccactcctagctatctacccaagagaaatggaaacatattcacataaaaacatacatgcatgttcatagcaacattattcattatagccaaaaagcagaaataatccaaatgtctactaactgatgaacaaataaaatgtgatatatatccataagacagattttttggtaataaaaagtattaatacatgctacaatgtggataagcctcaaaaacactatgctaagtgagggaaaccaaacacaaaataccacatattgtttaatcccatttatgtgaaagatgcaaagcagccaaatctatagagagagaaagcagattcatggtgcgtagggctggggaaatgtggagtgaaagggaatggggattgtacgagttttggggaaggctgatgaaaatgttttaaaattagactatggaaatggccgcgcaactctgtaaatatactaaaaactaaaaactattgaattgtacacttaaagtgagcaaattttatgatatttaaactgctaaagaaaccagacaaacattattgcagtaagaggcatggattcttaccccagcagttgttaggcaggtagtgaactctttagacagagaggacaactctttacacaacacaattgtcatcctaggaaaga

SEQ ID NO: 524 - DNA, 710 bp, Homo sapiens
caaatgctgattttctgtgtcaattgctggggcccagagactaggggtcagagtactatggtcactgtgataaataaccttgctattgtctgttagtattttcactcttagcccagagactgggttcccagcttggccctcagtgcccatcccactacccatgacagcccaatggctccacagagcctggagctctaaagaagatgggctgaaaatgtcagatctatgtgaggagccttcctgctctaaaagctctcatccctctggcccagatctctggttttctttgatttattgttcttacaacccagaagcattagatctttttggtggaagccagaaaggcatctcttgtttacccattaacaatcaacgttatgtgtacatatgtttatccattaacatgtatggcttattcatttgctcattcttccaacaaatgcaactgagcttctattagcccaggcatccaggatatacacaatggaggtatattcttgaccctggaggttcttacaagtcaaataagggagagagaaaaagtcaaccaatgctttctgtgtaccaagaactcagcacacatctagcaggctttgtctaatttgatcttcacagaaaacgactcccattttacagaggaggagacaggccctggggatattaggcaagttttttaaagtcatgaatccatgtaatattaaagtccatgt

SEQ ID NO: 525 - DNA, 710 bp, Homo sapiens; identical to SEQ ID NO: 524

SEQ ID NO: 526 - DNA, 516 bp, Homo sapiens
tctttatctgttctattcccttgcctttttgtcattttatagttatttctttacattctgtctccacctttttctccttgattaaactttccaagaagtttaattgttttacttgttgttgttttacttttcattttcctaattatttgtatgcatgaacatcctttatcaattagtcattcacatgtctttattcagagctttgtatattcatatcctttgcatgggctaatgatacataccctttgtacctttctgctggctgatagacctttttcttattaatgtgtcatattgtggatgcaaattatttatctgaaatgtgcttatctaattgacatttatcttacagctttgctcatttagggagttgctgttgtagctgttttttgccacacagaactttcataattatatgaatcccagtcttttcctttatagcatctggatttcctgtcttttgaaaagacctccccatgccaagagtttgaaaataaaattgagaaatgaaataat

SEQ ID NO: 527 - DNA, 2272 bp, Homo sapiens
tttttttttttttttgagatggagtctcgctctgttgcccaggctggagtgcagtggcacgatcttggctcactgcaagctctgcctcctgggttcacgccattctcctgcctcagcctcccgagtagctgggactacaggcacctgccaccatgcccggctaaatttttgtatttttagtagagacggggtttcaccgtgttagccaggatggtcttgatctcctgacctcgtgatctgcccgcctcggcctcccaaagtgctgggattataggcatgagccactgtgcctggccacatcttgcttttttttttatgatcagaacaaagggcccactctagttctctacatgtcaatcaatcaagcatgttgaataagggacatagaggatttaacttttgttatcataaatggaacttgcaggcatatatcaagaaccctatgaagaattcctctcccatcattttgataaagaactacatcatttttgatagaattggtgaatgttcctaaactgctgaagctacatgttttttgttttgttttacaaagtcaggtgtttgagagttcttttccactctactactactcatagagcttgttttttctttgggtgtgtgctgatcctgttactgagattaattacatggctctgcagtgtagtttacataaaaatgatgttttccacttgattgctgcagatatcaagagtttgttattttcaaatacccatccaacaagagagatggggaggtttttagttatatatgctatatatatatatataactggaaatgttttatatgttttccgaaaatacaataagcctctcttttattcagtgttcttcctcttttctcccttatgaaaaagaaaagatagcacaaaacttaagacttacctaggaaacccattcatattcccaccatgatgtaattataaccctacaattacttcaggtagctacacaatataccaggtaagaatcaatgcacagtataaagaacttattgttcttttctattctttcagttgaataagggccagttggtatgcagcccatgtatatgtgaatggagtaagataaaccccatgatctccttgcacagaattgcaaatgtcttttgccataccaagggccagactcagaacccttggagtcatgtggcagaatttccctcttacataaaccaatgcttgaaaatgctgcaaatgaccctctaatgatccctgaagatcaaaacaggggtaaatgactccctgcaaaacccaacccatgctgctggctgtgggatttttggtgtaagcctatctatgcactctatcagccagaatttggcatttagctcttagttaaatctagtaaaggacagtctattgtttaaagagaaggtgcatttgttcctcaatcaagcaagagcacctgtgttgtactgctttatatctcatgtatatttatagtaatgaaaagactttttaaattgtacacgtttcagtgcctttcttgtgttatgaaaggcaggtagatattatagccataggtaaaaatccatagttaaattgcacactgaccttaaatctctctgtgtatgcccttgtatcttgcatgttaaaagttggattattgggcatgtgtggcagcctgccctgctacatgctagacaagtgtgctttagtacatagccacaagttcttcattctttaaaatgttttgacagatcatctcataataaaaataattcaggaaaactatggggaaatagttacatttcacaaaagatattttaaactctttgtaaaacttagataatagagcctagcagttactttgtatctaattgatacattttatgttaatttaccaccatacattttattaatcaaaattgtatagcatgtgactcttttggctttcagagttctcaaaaatattattttgttgcatgtactgtatgtttagaggcaaccaattatatactcaatatggttttactgtgccttacacaaagagaaactctatacagaatgtatatcatggggtggggtaacagagtctttactgcactgttaggtgatggcacacagagcatgtcccagaacatttctgtgcttaattacccaaccaaagagatctgaagtatgtatgtcgtactgtaatgggggtttatgcctggacaattaagtgttttatttgttttctgaaatgatgtgaacttatttttctaaacactatgctaaataaactttatatttatacataccttgcattga

SEQ ID NO: 528 - DNA, 312 bp, Homo sapiens
cattttaaaggaaagaaaatatgtaaattctattgagcaaaattctgtcctgttgaaacttagttctaaaggttttgaatcagttgttacactctgacacatgactgttgtttgcactatattatcatgtcttctttaaaagtaaatatttttggtttctgtaagaagcttgtttaataatgttgtaagccgtggctatagttttatcaagactctgaacacaagatgtaacaatgcaaataaatttatgtagtgagtaaagttgctctctagtctctgaaaagcaaaaaaagtgagaaaataatttcttca

SEQ ID NO: 529 - DNA, 1524 bp, Homo sapiens
gaagctggcatctgcagggccaaaggcctctggccaaggcacccataccaaaggggacagactggccaaagcagccttatccctatctccttaggaaccacattctagtgggatctgtttggtgatacaggttgggagcatgggtggggaagcctaccccaggcctgattcagtcatgaggatccaggagcaccctccaatggctgttgctaactacagttgccagataaaacttaggtggaatctgagtttcagaaaacaaacaaaaaatgtttttagtatgtctcacctactgcctggggcgtacattacaaatcagtccttatatatttgaaactcaaattacattgggcatcttgtatttttatttttttgagacagagtctcacactgttgcccaggctggagtgcagtggcgcgatctcggctcactgcaacctctgtctcctgggttcaagtgattctcctgcctcagcctcctgggtagctgggattacaggcgcctgccaccatgcccggctaatttttgtatttttagtagagatagggttttgccatgttggctaagctcgtctgctaaccctagagctgacaggaaggcttttgggttgggcggttttacggggaaaatactctgtaacagcgtttttcctttactctcacatcacaacaatcaacgcagaagagttatgaccaaatgtcggggtggggggggggcgtttccccacacaccaagcagctgggtgtcctctaatgcagtctgacactgaaaagtagtgtcagatcccacattggagggctcagtccccaagactgttcccccaacaccagttgtaagtccagacctccagaacttctgaccaactggcttcaagttggggttcccgtgactccctcttcgggttcaattaatttgctgaagttgttcagagggactgaaatttacaaaggtcagagatggtagaggaaagagtatggtaagtgtggtgtgcaagcccatctagtgggagcacagttgaggagggaacaggaggtggaagccaggtgggaaaggaagtctggggccctgttggaaggaccttgaatgctgtgttgttatgatagacagttttcctccatgattcctggctcataactcccatagcccttgttacagtcttttgttgtaatattgagtgtgttaggccacaggaaacagactctctccttctcctgccctcctttcacctgcccccaggcaggactctaatctttcctggactttccaatggttgttcttaagaccattcccagagaggttcccaccctataccccgggggaaggaatgctgacgttataaagctttcataaaaacccaagcggacagggttcagggagctttgggataactgaacacatcgaggttcctggagggtggtgcctgggggagggcttggaagccctgtgcccctcctcccacacctgaattgttttttctttttcccttcatgaaactcttccctgctccttgtatgtgcctccat

SEQ ID NO: 530 - DNA, 103 bp, Homo sapiens
tttttttttttttttttttttttttttgagacagtgtctcactctgtcgcccaggctggagtgcagaggcacaatctcagctcactgaaatctccgcctccca

SEQ ID NO: 531 - DNA, 620 bp, Homo sapiens
tggcagaggatatcatttgagctgtcatagcagaggaccacatttaccagggtgcactttggccaaagaatagtaacctttctaaggcttagttcctctggcctgaccaaaccagtcccaggaggcccctgggttccagtcaaggtcatgggagaggcccaccatggatgaggcctgggggagcagggtggaaattaagtgcccaggtatgttatggatagcctgcagccctctccaatccctaccctccaaacccagtgaagggggacatgaaacaggtgaggcagaggagcaaatgcgggtcaagaattccgaactatacttgacttacagtgcagctgtgatgtgcacattggtgtgtgccacgagacagcatagtgtggtggaaagaaaatgggttttgaacagagtgtcctgggtttgaatctctgcttgcccatgtactagagagtagtcgaacctctctgggcctcaatttcccagatgtaaaatgggaatagtagtacttaccttgcacgggtgctgagagaattccatgagacgacacaacccgtgtaaagtgcctggcataggcatatcacattagggcactcagtaaatgtgatgtcttttctacttgc

SEQ ID NO: 532 - DNA, 3266 bp, Homo sapiens
acaggctattttatctcttgaatcagaacaagtgccattaatgtcagcacactggtgcttaaaaaacaccttcaaagttggagccgttgcaggaaatgattggttaatttgggatattactcggtccaggtactttcttgatatgtttgtctattacacaccaaaaaaaggcagtaactgttgctaaatgatccactcatccatcctgttatacctgagactatgctgtcaagcgaaagcaagtctttcctatagaaggccagagctatggatttttatataacataaacttgctatgcagatttactctgggagtaacccagaaaggacagtgcaaaagaggaaatcttggatctgtgcaatgttgacttatattggaaaataagaaaaacactgaccctgttgcatgatggttccctgcagtggttctaagtcatgtctttattgtatttcatctgttttaactgattgcttgtttaggatttattatagtttaaacacattggacattctgtcctataaagagaaaatactgtttaaaccttaagttcacccacttgagtttaacacataattcataaaatgcaaaatattatcttttagttatcctcaaaataagagacctgttcacatggatcgagcctgcttattcaggtaatgtaccgtttttgttggagctgtgatttgatcttttgacgttgctgtgccaccactgggatacttttgtagttctcttctttgcactggattttttttttcccttattgttttataagtggttattttactttcccgactaagtcattgcctttgtcttttggtctagacaaggagttgatttgttttccaaatattttctttacacagaaaaacatgtaaccactccaccactaccacccctacaatttggaatatattatgcttcctgattgttctgtgctgttaaggatgtaaatgtaggggagcccatgttcatgtatataaactttattattatgtgttaaatgaaactatgctagatagtatatctctgcgacatgtttttgcttttcacttaaattaacatacatgtctaccttgttctttttcataatactccattgtatagtgtggtccttaagccattatttctgctttttaagtaacagcaaaaccaaataagagactaaaaccagtgaaattttattatatgctatattccaataagttgtagaacttagggataccattattaagaataaaatacattcgactaaatgtaagaatgccatggatcgttaagatacatcctgacttcagagatgtgtgaacaaatatacaccaatgagcaagtatccatcaattttaaaatcaatgagctatggtacttataagtctagaggaggtagtctcagggcttgttgagcagctcatcaatgtcatcaagagctcagacccttttcatcctttccctctgctattctcagtgtcaaggattgggacttgttgcttcatagttacaagatggctgtgagagttccaggcataagagaagtactccatttgccgaacaattaaacaaaaaaaaaaaagtaagaggagaagaaggaaccctctccttttatgggagattgctatgactgccttaaactaattatgtctcatcccctagggtaggacacactgtgccctgaacaaagttaggcttcacttagcatggaaaaggggcagaatggctgtcatatttgatgccttatttgtttcttctaccacactattacccctttggttgtgaaaaaaaggattgtatcaaccttgtgtaactttggaacttaatgaaatgacacaaaataagcacttcataaaacttaaagtatgagaaaatatttatggaatattttcctggaattcccggtctaattgtaaagacatattaacaaatttaggattattaaaatcactggttttatacaaaaagaaacctgtttctgtctaggtgctatggctcatacctataatcccagcacttcaggagaccaaggcaggaggatcacttgaggccaggagtttgagacctgcctgggcaagatagcaagaccccattcctacaaaaaacaaaaaattaaaacttacctgggcatcgtagtacacacctgtagtcccagctactagggaggctgaggtgggaagatcacttgagcccaggaatttgaggctacagtgagttttgttagcacttctgcactccagcctgggtgacagagcaagaccctgtctcttaaaaaaaaagaaaaagaaaaagaaaaagcccgcttcagaaaagcttgtcattatccataggatacgatacttaattttacgcttccttatttcttaggtggtccacaattagtgaaaatctgtttgcaaccactggttatcctggcaaaatggcaagccagtttcaaattcatcatttaggacaccctcaggtaatgtggaaatgttttgtaacatacgtgctttttttttttttaatttgtgtttttgacttttccactcatagccccaaatttgtaatttgttgactgaagacatttacgtttgttatctgcttaaattgcaagaaaaggtggttcatttgtttttgttttttgtgtggtttttttttgatgtttacattaccagtgacaacaggtttttttggccagtattcatataagaagctttttattctgttgcttttatattttcttctttatttaaatacattaattttgcttgtttggttggtgtagactgcaaaaatggagtctggactgtaccagttattcatagatggattgtatcccatgtttcagctgcgtatcaataatgtgtatttcacctgtaagggagcatatttttaaattttgtttatgctacaaagataaatcatcaatgcatttcatatttttgaaagtcatttttatttattaattttggggacttactgtgcttctttaattcttcacatattttatagcccatcctcatgggttctgtagccgttggatctggactgtcctggcatcgaactctccctctgtgtgtaattggaggagaccacaagctgttgttttgggtgactgaagtataaagtgttttctgtaccttagattcacaaactttgtatttttagtacatattttgaagaatttctatagtacatattttgaagaatttttatatcaaatataccgtatactttagaaaatgtctcagttgcttttattaaataaaatgttgatggtttgaaaaattatttt

SEQ ID NO: 533 - DNA, 779 bp, Homo sapiens
acctggccaacatggtgaaaccctatctctactaaaaaaataaaaataaaaaaaattagccaagcatggtttggaagactgaggcaggagaatcacttgaacctggaaggcagaggttacagtgagccaagatcgtgccacttcactgcagcctgggcgacagagcgagactatctcaaaagaaaaaaaatccaaggagaaaaaaatatcttagggtattctggaagtggttgttgagtatatatatgtgtatgtgtactcaatttaatgtaaaaaattgttttcagtttcttaaatatgtgattgattatattgctcaaccctgtttattatacgcagattcctttggacgaggtgttctaacagtcttagaacatctgatatatgggatcaaaagttaccttgaaaaatgacttctagtgtatacctttaacagcctcctttttgtgaattttcactgttcttaccaagaaacttaagtgtttttgagatgggacctgttggcaatggaactgtgttcaccctctcaaagatcattaaaatcaacgttatctaagacagctgtatcacatttttgggatacatcatggtacagtcagaagcatataaaattatggttctgcttgtcagtcacatacagaatccaatacattttgacaaactgcccattcctgcaagttaatgccctttttgaagcttcatttcctcttgtaaagtacagataggaatcattattttgtggagttgctgtaaagattaaataaaggtgaatgaaaata

SEQ ID NO: 534 - DNA, 846 bp, Homo sapiens
ctttcactttttataattgacataagcatatttattgagtcaattgttcagctaagtactagggaggcttcattagtcatgaggatgtttttatatataaatgtagcaaacatatattacagttttcactgtgtaatagattatccataataattcataaatattcctgctgaagttagtttgtaacttcaagtcaaagatgaaaaatatcaatggtgaagattgattgttcatatagagaggacattttttttccagactgtaaaactgaatcttgttgaatttaaagagaaattctggcagaggcagatgaatcacctgaggtcaggagtttgagaccagcctgatgaatatggtgaaacccagtctctactaaaactacaaaaatagccaggcatggtggtgggtgcctgtaatcccactcgggaggctgagtcaggagaattgcttgaacccggaggtgaagattggagtaagccaagattgtgccgttgcactacagcctgggcgacagagcgagactccatataacaaaaaaaaaaaaaaaaagctgggcgtggtggctcacgcctgtaatcccagcactttgggaggccaaggtgggcgaatcacttgaggtcgggagtttgagaccaggtgaccaacatggagaaactccatctctactaaaaaatacaaaattagctgggttgttgtcgacgcatgcctgtaatcccagctactcgggaggctgaggcaggagaatcacttgaacccaggaggcggaggttgcagtgagctgagatcgcaccattgcactccagcctgggcaacaagagcgaaactccaactcaaaaaaaaaaaaaa

SEQ ID NO: 535 - DNA, 6198 bp, Homo sapiens
gggaaagcctttaagcagtcctcaactcttactaagcattaaatattggccgggtgcggtggcttatgcaaaatggctcccagcattttgggaggctgaggtgggtggatcacaaggtcaagagatcgagaccatcctggccaacatggtgaaaccctgtctctactaaaaatacaaaaattatctgggtgtggtggcacgtgcctgtattcccatctactcgggaggcttaggcaggataatcacttgaacctgggaggtggaagttgcagtgagccaagattgtaccactgcactccagtttggcaacagagtgagactccgtctcaaaaaaaatttatactgtacaaaaaccccacaagtgtgaaaaacatggcaaagccttttaagaagccctcaattcttaacagacataagataatttatactggagagaaactctacaaatcagaaagatgtgactacttttgacaacgcctcaaacttttctaaccataaaagtaattatactggtgagaaatcctagaaatctgaagagtgagataaagcctttaaatggttgtcacacttcattgtaggtaagataattcatactggagaaaacgcctacatgtgtgaacaatatggcaaaacttaatgctcacactttattgctaggaaagcatttatacttgagataaattatacaaatataaagactgtgaaaaagccatcattatctgctcacattttactcaacaccagagagttcctgcttaataaaagcattataagtgcaattactgtcaaaagatctttcagaaaatataagcttttttagtgaagagtatttattttgaagttgaacatcacaaatataaaaagggttgtagtgcctttacttgtatcacagatctttttgtagacattttcttctagaggaaaactctgaagcagttgatcaaactttgttcaacatcagggaatttatattgaaaaattgtgcaaatataataaatttggaaaaacaatttttcaaaaactacagcttagaaatcaacagttatactagaatatattttttccagatgcagtaaaagtaaaatatttaatccataattaagtctatgcaaatatcagagaatttatggtagaaatatataaggtactgacacttcagatatactaaatcagagtgctaagtatagaaaatctgaaactaaagttggtagaaaagttatttgtatagaactttaagaggatcagaaggttttttgcagagttataattacattcaaagtatactttatttcttgaaaaatattacagattttttgaaaattgaataatgtcatcattcaactctgaaattatttcctgttgtttcttcattcctattggattcacatgtgaaagcatggggttaattgttgctacatcaaagagagagattcttttgtttgtttgttcgtttgttttttgagactgagtttcactctttcgcccaggctggagtgcattggcatgatctcagctcactacaacctctgccttctggtttcaagcaactcttctgcctcagcatcccaagtagctgggataacaggtgccagccaccatgcccagctaatttgtgtatttctagtagagatggggtttcaccatattggccaagctggtcttgaactcctgacctcatgtgatccgcccgcctcagcctcccaaagtgctgggattacaggcttgagccaccacgcccagcctgtagcatattttaataggagaatacaatatataatagtagcagggttaagtaaggcatccatcatctgtagcatttctcctttgttttacaaacaatccaattctacactttaaaaaaaaatttttaaatgtacaattaaatttttatttaccacagtgttatttttatcgtcataataaaaattatatacgagtataaatgaaattcatttctaaattcttaataaatattttctcatgccaggtgtggtggctcacgtctgtaatcccagcactttgacaggctgagcgagggagtggatcttgaggtcagcagttcgagaccagcatggccaatatggagaaatcccgtctctactaaaaatacaaaaattagccaggcgtggtggcatgtgcctgtaatcccagctactcaggaggctgaggcaggagaatcgcttgaacctgggaggtggaggttgcaatgagccaagatcaccccactgcactccagcctgggcaacagagcgagactccatctcaaaaagtaaaatatattttcaaattttctatatatttttctttgaacatgtggcctgtctgcctgcaaacatatacagacttttagttttgattcatatagagttaaatacatgttagtctaaagacaaatcttaggtgtaagaaaattatggagttaagtatgtgtgtgtgagtatgagtttgtacatattttcagaaggaaagaatgatacgggaacaaaaatcattttaatatggtgactactataaaactaaaaacctaaaaaatgctgaaagcaaatgtatactttttggtttgtattgaatttattactgtacagtctatgacttagagttctgaatcttcccaagcaaattctctgtatatacttgcctggtactcatgctagacccatactttttttgtttcttacattttttttgttttatattttatgaagtattcattatgtgagctggtctgcgattataagaatttttatgaaatttagtgcacacaaaataatctttagatgtaattccaaaagtagtgtattaagttacattttatttagttagagcactccattttgttcttttaagaggagaacaatatataggttttctttagtgatttgttcctttcactttttataattgacataagcatatttattgagtcaatttgttcagctaagtactagggaggcttcattagtcatgaggatgtttttatatataaatgtagcaaacatatattacagttttcactgtgtaatagattatccataataattcataaatattcctgctgaagttagtttgtaacttcaagtcaaagatgaaaaatatcaatggtgaagattgattgttcatatagagaggacattttttttccagactgtaaaactgaatcttgttgaatttaaagagaaattctggcagaggcagatgaatcacctgaggtcaggagtttgagaccagcctgatgaatatggtgaaacccagtctctactaaaactacaaaaatagccaggcatggtggtgggtgcctgtaatcccactcgggaggctgagtcaggagaattgcttgaacccggaggtgaagattggagtaagccaagattgtgccgttgcactacagcctgggcgacagagcgagactccatataaaaaaaaaaaaaaaaaaaagctgggcgtggtggctcacgcctgtaatcccagcactttgggaggccaaggtgggcgaatcacttgaggtcgggagtttgagaccaggtgaccaacatggagaaactccatctctactaaaaaatacaaaattagcccggtgtggtggcgcatgcctgtaatcccagctactcgggagactgaggcaggagaatcgcttgaacacgacaggtggaggttgcagtgtggcgagattgcaccattgcactccagtctgggcgacaagagggaaactccatctgaaaaaaaagagaaattcttttattttctacttctcttcagatttgtcttatgcattttccaactatgtatgcatcacagctattctttttctgagttatagctacagttttcttactgttgtcttcatgccatttcatttcacatggtactttgtagattttgatgaggaagttggtatttttagtgcacacaaaaattggttttaactgtagagtttgcttatcagaacagttaaaaggcagccaggtgtggctcacgcctgtaatcccagcactgagataggccaaggagggtggatcacttgaggtcaggagtttgagaccagcctgaccaacatggtgaaaccctgtgtctactaaaaatacaaatttagccacgcgtggtgacgcacgcctgtaatcccagctactcggaaggccgagggagcagaatcgcttgaacctgggaggtagaggttgtggtgagccgagactgggccactgcacttcagcctgggcaacaagagcgaaattctgtctaaaaaaaaaaaaaaaagataaaaggtgcaatactgtccacaggtaagataattaaattagtcagctttgtttttaaaagaaaaatcttactagattcttatacaaagtgtggcaaatataaaacttgcttgaaaatacagaaattaaatttttaagagagttaatggtaagtaaacaattttaaagttaattttctatgatatacttacagcacaacttatatttccatgcagaatcttttatttttaagtgtgagtgttaaaggttacaaaataatgaaatgacttcagtggatttaaaattttgaaaaataatgtcttttctatattgattttacaatttggagaaatttttcactcattttttatatattttttagtgggagaggtttagtctacagtttttatttttagtcaccaaactgtagccaactcttgggtcattttctctgaaaaacatttggagatcatgacagcgtttggattaaaacatttctgttactttgcatgcaaactagtttactgtgttcacagagtggccagtcatgggaccataagcaacacctgctctttgagtgtctttcataccgttaccatcagcaccagaaactccaggtgccccaagcttaaagtaaaaatcctaaagtacgttggctcctcccatgcaatgtgctgggtccaaaccatgctgttaaatatcagaagtttctatggttatgattaaaaaattaaatgacaataatagccccaaaactatatatttttgatactatttaaccaagattatcacaaagacacagtatttgacacattgttattcttctatgttttataaatattttaatgtgacaggtagaatctgtactttttctgtagaacgtaatattttgaagtatatatatagttaaattattatttctaggtaattaataatttatctcacattggtcagacatgatggctcatgcttgtaatcccagcaatttgggaggccgaggcaggcagatcacatgaggtcaggagttcgggaccagcctggcgaccatggggaaaccctgtctctactaaaaatacaaaataagcagcgtgtggtgacacatgcctgtaatccagctaccctggaggctaaggcaggaaaatggctcaaatctgggaggtggttgttgcagggagccgagattgcaccactgcactccagactgggggacagagtgactatcaaaaaaaaaaaaaactttacctcatatggtgaacatttttgttttgagaccacatgacactgtcatcatttttcaaaaatccaaatacattattatgaactatagtcaccatgttgtacaataaatctcttgaacttatttcttccatttgactataattatgtattatttcacaaacatgtttccagccttccatttcttataaataacttgcatctgatggtcaccattttactctctacatcaatgggattaagttttttggaatccatgtgtaagtgaaattatgagacactaatctttctgtgccttgcttatcccaactaatacaatgtcctccaacttcatccatgtgattgagaataatagtttttgttttttttttaaggccaggagtggtggctcacacctgtaatcccagctctgggaggccaaggccagtggattgcttgagcccaggagtttgagaccagcctggacaacgtggaaaaaccccatctctactaaaaatacaaaaacaacaaaacaaaaacaaaaaacacctcagctgggtgtggtggtgcaggcctgtaatctcagctactccagaggctgaggcatgagaatcccttgaaccacagatgcagaggttgcagtgaactgagatcatgccactgcactccatcctgggcaacagagtgagactcggtctcaagagggaaaataaggcatttttctcatttaaataataaatagtattccatt

SEQ ID NO: 536 - DNA, 32216 bp, Homo sapiens
cagccaccttttagtttttttctggtcgtgggtttcagtgctgtctggggatgaactaagatatccaccgtggttatgtcagctaaagtgcctagtgaatatcagcttctggtttattttcttccataggacgacttgaaatatggagtgtatcctctcaaggaagcaagtggatgccctggggctgagaggaatcttctagtttactcttattttgaaaaggtaacctcttgagacattaaaattgtctacgcccaacccagctttcatttcttggggacacattgctggtcagccagtccgatgctggcactgatgggaaaacacagaaataatgtatgccccctggattgtcttagggggcagaaagataatgaaataaatatagtggaagaaaaatagtgttaaaaagtgaaaaatttgtgacagataaaatagtatcccaaaagaccagaaaaaaacaaaaacaaaaacaaaaaaacctgactctagtgagatggtgtaagaacttgcaaagtaaaatgcacctggagcagtcaccgagaaatactgcagtgtctcctgtatgggtggttcatgagcacataagtgagcaggagtgggtggaagaatctcccaagtgattgaatggcctgacttgaaacatgagtcagacacacatttgttttttaatcagcactgccactccctgggtttgtcaccttgaaaatatttgtttacttattttgacctcacttttttagctgtaaattgcattatattagtagggcttgaaaggtaggaatttttttttttttttgaaacaagtttcactcttgctgcccaggctgcagaaggattgatcttggctcactacaacctctgtctcccaggttcaagcaattctcctacctcagcctcctaagtagctgagattacaggcacacaccaccacacccagctaattttttgtatttttttttagtagagacagggtttcatcatgttggccaggctggtctcgaactcctgacctcagatgatctgcctgcctcagcctcctaaagtgctgggattgcaggcatgagccactgtgcctggcaggtaggaaaatatttacaaagggcataaaagaggtgggttttagaaaaaaaattaatatctaattatgtatcccatttgttaaaaattctcatttacctttttctttcccagagtgagtttacaagtttcctcaggtgtgttttttttatggctgggtgcattcaaacagaattccaaggcttagcttttagaatgctagctaccaaggaaaagaatagggaaaaatctctattcattctggctgtacagaatgaatacatttccatgagataatgtggtagataattggtgagttacatagattcatgaaaacatcagttgctctttttgcagggtgaatttgtgactaaatatctctgttcaaatcctgttatcttgatttctgagtttcatgctacattttatgagatgaaacttggtatcacctagaagtattcccatataactgtttactacatggtttttaatgaaaacaataaaataatagatatgttgtctgaaaggaatggatacttttgcttctcttatttaggtacaaaatgtaagtacctttgagtaattttgctggatttttcaaacacatagtttcgaaaaccaagtgagtaactctaacatggaaattaaagcttgagcccagtgactaagagctaaggctaatattgagcctacaaaaggaggttatgaaaggcccacctatgcggtggctcatgcctgtaatcccagcactttgggaggccaaggtgggtggatcacgaggtcaggagatcgagaccatcctggctaacacggtgaaagcccgtctctactaaaaatacaaaaaaattagccaggcgtagtggtgggcgcctgtagtcccagcttactcgggaggctgaggcaggagaatggcatgaacccgagaggcggagcttacagtgagccaagatcgcgccactgcactccagcctgggcgacagagcgagactccatctcaaaaagaaacaaagaaacaaataaaagcccagctagtttttttctggggatcctcccctgcagatgtcccagtctgctcaacccagccatggaagaagcctttctgctgacacagccctggaaagctggggacccacaggcaaatgcagttaggattaagatgaaaggggactgagaggatcttactgatgatgttgttattgttttgaggcagtttctaggctttggaatatcaaagttagatttatgtaaaaaaaaattccgaaagagtattgcaacaggaagaagtaccaattataaaaactgtaagtattggaaagtttaggctgacaagggctttctttcctagggaggagcaaacaggattagaaagaaggtgggaggggaatggcaaatgaaccgtgaaaaatcagattttagatcagagaatgttttaccatgaagtcagcatgttcttagacgagacataaaataaggttgtatgttgaatcagactgaggatagttcaaagttctggagcctgtgaaaaattttatttagaccactgaagacaaatgcagctgattcttttaattggaaaaataagaaaatgtgcagagttctaccagaaagaggtcccaatccaagccccaaaagagggttcttggattttgctcaagaaaaaattcagggtgagtccatacagtaaagtaaaaggaagtattaagaaaatatcacaaggtcaggagtttgagaccagcctgatcaacatggtgaaaccccgtctctactaaaaacataaaaattagccaggcttggtggtgcacacctgtaatcccagctactcaggagactgaggcaaaagaatcacttgaacccaggaggcagaggttgtagtgagccgagaccgtgccactgcactccagcctgggtgacagagtgacactctgtctgaaaaaaaaaaaaaaaaaagaagaagaaagaaagtaaaggaataaaagaatggcttactccataggcagagcagcccaagggttgctgtttgcacatttttatggttatttcttgattatatgctaaacaagggatggattatttatgcctcccaattttagacaatataggatagcttcctaatgtttccatatttgtaagctgtcatgacacttgtgggagtgtagcagtgagggcaatcagaggtcactctcgtcacatcttggttttggtaggttttatttgacttctttattgcaacctgttttgtccacaaggtctttatgacttgtatcttgtgctgaccttctttcctaccctgttacttagaatgcctaaccatccaggaatgcagcccagtcagtctcagtcctattttacccagcccctattcaaaatagatgtgctctggttcctctgacatctcccccatctttttcacaagggcacacttaatcctgagggttgtagagggatgaagatccattttctgtaactacttcatgctgaataggggtgatgatatttttgcctaactattcagttttcttgaccctgaaacaaaggatcagtgacattttatgtgaagtcaaaaagtattactttcatcttccattagttcagtcccttcagttaattcctgttctgtttgattgtcatgaacattccagttctccatgtatactgaatgttttttctctattctaatgtcacaatttctaaagttatcacaaacttgcatttaagaacatctgttgctgggcacagtggctcctgcctgtaatctcagccctttgggaggccaaggcaggtggattatctgacgtcaggagttcaagaccagcctgatcaacatggtgaaaccctgtctctactaaaaatacaaaaaaaatagctggatgtgctggtggacgcctgtaatcccagcctagttgggaggctgaggcaagagaattactcgaacctgggaggcagaggttgcagtgagctgagattgcatcattacactccagctccagcctgggcaacagagtaagactccatctcaaaagaaaaaaaaaatagaacatctgtcaaagttaactataaatcatcttttgaagagtaccaacacaagatgattgtctggatggcaaagtcttagggcagtcacagtgaaaaaaaaaaaaaaccatgattgacaaggaaatttggttagctctgtgtcatataataattttatgtaacgattgtgattattaatgatgttttaccatgaagtcagcatgttcttagaagagacataaaataaggttgcatgttgactcagactgaggatagttatattatcatattagttacattagtcatattagaattacaggagtttcccttaattttggaacacataccaataacatatttacacaaatatagtccaaaaatagtcaaacatgatttcacagttgacagccttttctgtgtgattttaatactaaatgagccaaatttttactattttatatttgtgtatgatttatgtcaaacccaattcttagtgaattttttttaatttttttttttttgagacagagtctcgccccgttgcctaggctggagtgctatggcaggatctcagctcactggaacctctgcctcctgggttcaagtgattctcctgcctcagcctcttgagtagctggattacaggtgcacaccaccatacctggctaatttttttgtatctttagtagagactggttttcatcatgttggccaggctggtctcgaactcctgaccttgtgatcggcccgccttggcctcccaaagtgctgagattacagacatgagccaccatgcccggcctcttaatgaatctttatagacaaatctatccaattttaatgtttgaccataaggtagtattctcataaaccttttataactcttcacaaagtccttgttgttagagtagatcagtgctttaagagaagtctgtcatttttatctcaatgttcaatttctagaaaaaataatacctatttaactttagtcagtatgttgacacacagaatctcttttgcaattaaattttagcaaatcttccacaatttgtttaaaccttcagttttattctatctaatctaaaacattcctttaaccttttaatctaggcaaaaaaatccacatttccatgtcttcttatataaccttttatcaaaaacatatttcactttctctgaattccttgcatgtaaaactgttttttagtagtcaaaattagatgttacaatgttaactcttagcaacttttacttttgatgaaaaccttggtaagtaaggaattttaattacatactaggagtgaagtctaggacacagacacaagtgtatataaggtctgactccagtgtattaatagttagggggtgtggctaacttgatgtgtcccaggccttacttagctgtaaaacaggcaagttgtacagtgaacagtcatagtggcattttgagaagtcttaatttaagaggcctaatgacctttaaattgtacaacatttcttgcataaatttccttcagtgaattatttcatgacttatacagaccatctacaatatgtttgggctttctgatttgtcctaaacatccctctttttaaataaccagtcattttactttaggataagaatttactatacaacatcttttcttatataaagtctcttttctttataacctttgtatatgtaggggacatggctaattccatatgtctcaaggccttatttagaatctactggcttcaagataggtaaattgaacaatttttaaaagtcaaagagccaatttatgaccttgaaatatttggtaaatctaatatgtgacctatataacttagatcaaatgtttatattttgaagactttttattttcccaatgatctttaaaactgtttttatttccaaaagattacttgtcacatgaactaaaaggtgttacacttttaacttttctgacaaaatatttgatttacgctcttactatttttaaaccaattaatcagagttctttcatatcacacacacaacacatgtaaatacaaagacagaagattcagtagttgtaaggtttttctttgtcaatttctttcttttttttgaaggaaagtttgtattattttaattatttttatgtatagaaaactcaacagtgtacatttaacccagtttagtggcaagttctttagtctttgcctttttgagcttggcgatctgagccacagacttgagacccagggccttccctccccagtgatggcggatctcatcctgtcattgtagttggtcctgatagcttcccccagcttagccaaagcacctttgtcttctgagttaacctgtgtgaagacgacagtggtgcaggtcttcctgtggactagacgtcctagtcttaccttccccttgataatgcagtaagggactccccttttatgacacagggcaggcaagaagacaaccagcttgatgggatccacatcatgcgcaatcaccaccagctgaactttctttttctccaccaaggtggtgacagtgttaattcctgctcgaaggacacgtggtctcttaataaggatgtcccctttgtcagcagctttcttctcggcccgggccaacagcctctgcttctcctcttgctttgtctctggtctgtacttgtaggctagcttaagcagctgagtagctgtttggtggtccaggccctgggtgaactggttaatcacagaaaaacactttcagccgcctatagaggatggctctttgctgctgcaacctgatatagtggggccatttcgggtgaggtcccttttgggctggatgtcctgcccagtgccacaattcttaggccttttctcaaacaggaaattcaccactttcttggcctcctgcttcttcacaacagcaggggttggagccaccttcttcccctaggccttctttccttttggcatcttgggtcgggggaggagagcttctttgtcagtttcttaactggattactagtttcagcgtggagcccagggccaggaaagcatgtcgtttttatggcctaaaaagtaaacagagctggaaaacaaaacagatcctcctaaattaagggtaccatttttaaatcagatcttggatctaaaaaggagagaattagttaatcccaagggaagtcttatttctcagtaggggttggggatacctccatatttcctaggtggtcaagattatgtttctctgatccaaatatgaagaactgagtatttccccataattgccattagccattccaaaagtatagttctcacctagttattacatgccaagtttcttttataatgtgaagtaatttctgataccccccaaagtcaaaaacatcagataacgcattgcaaaacgaacagaaccttagattttgagaaggctctatccaccttcaatttttggagtttcatgaggaaaaagtgtttctcaaaagagggcctgcggcacctcttctgtttttcccaaggtgtcccaggctgttagagcttgaatatctgctgtacttaagctgacttttaaccacagtgctttttttttctttttttttttggaatggagtctcgctctgtcgcccaggctggaatgcagtggcgctcgctatcttggctcactgtaatatctgcctcccaggttcaagtgattctcgtgcctcagcctcctgagttgctgggactacaggcgagtaccaccacaccaggctaattttttgtatttttagtacagatggggtttcaccatgttaaccagaatggttctatctcctgaccttgtgatcagcccaccttggactcctaaagtgctgggattacaggtgtgagccaatgaccacagtgatcagtgctcttttaaaaagtccttttaaatttcttattaccagactttattcaggtcaaacagccaatatctctggcttttgaattttaccaaaagtaacttcacaggtgttctgaaaagaaaattcaaggtggttcctggaggggaagagaatcaacaaatggtaaagctcacccaaatatcaaataagaaagtactcattccctaagccgggaattgaatcctgaacctgggccaccattatgatggtggagaccaagagaaaatactgtcatgtggtcacaaggtggagcttccaaggccatgactgagcacttttctgagccatcttgaacagcagccttaaggggtcctaggcctgcattctatcctaaggtacccctcttaatgacagaagaatacagaaagacaaatttattagctcaaagtacaacagatttgttacagcttaagactaacctcacaaatgcattcccatattaattagaactttacatagaagataaacagtattttttttcaccattcattcaatcagtttgcatagagaggctagaagtctcgtcagaaatttgtacacttttgccagcatgccaggcttctgggttccatttccccgagtggccctagtgatgtggctggctgcaccacagccccgtgggccaagccacaacaaaaagaaaaattatctttttctggccagatcaaaatatatgtgacaacatagaccttagccactcttcttaacaaccaatatgaaactggcaagacttaaacttggccccagttgggccctgtcattgttaattcaacttaataatcaggagttttatcttttggtctctaggcaagatggttactctgagtaatataaaataagaaagagaaaagagagaaaaagcattgtctgtggcagggtaggaaggcaaagagctgaggggtccagagaaagacctactcattgcagcgataataaaaagttcaggtggccgcttcttggtaggaaagagatttttttcccaacagtcccattaacacttaagttttcccttttggacaagaaaaagatccccatgtcccatggtcctgtagatgcctaattctgtcacccatagccatcagcaaagagtgcaagacagattaatccaaaaagaatagcaatgaatgtcccatagtgtcaaaccagttcttagctgagacggattttactgagaggggtctgtaactttctgaatcttaggaaggaatataacctttctaagctcggcctcaaatccaagttcagtcaagcatccttgtcttttattaagaggagcctttaacccactgtgtcttaggagagactctaattctcctaagttgtgcctctaacccaatcccatcctttactcaggcatatgcacaccactcacccaaagtcagccgattggtgcacacagatgattttcctttgggtcagaggtctcttaagtatagtccctttgtggttaccagaaagatgttaccggaaagaagttctgatccagaccccaagagagggttcttagatctcgctcaagaaagaattgagggcgagtccgtaaagtgatagcaagttaatgaagaaagtaagtaaatagaagaatggctttctctataggcagagcagtggctgctagttgcacatttttatggttatttcttgattatatgctaaacaaggggtggaatatttatgcctctcctttttcaactattttaagataacttccagacattgccatggcatttataaactatcatagcactggtgggagtgtagcagagaggacaaccacatgtcactctcatcgccatgttaattttggtgggttttatccagcttctatactgcaaactgtgttatcagccaggtctttatgacctgtatcttatgctgacctcctatctcatcttgtgagttagaatgtctaaccatctgggaattcagcccagtgggtctcagcgttatttttactcagcctctattcaaaatagaggctgctctggttcagtacacctctgacagagtctgtgtctggctatgtgataaataagaaaagagagcaccatctaagtcataatgggaagggtgtttctttccataaactatttctagagaacacaaaggatgaagaattttattaatcacagctatttacccagattatgtatgtgcttcattgttccccacctcttttctttgtcatatacatttcttccatttgacttttcctgggttgtactttttataataaactagtaaacataactacagtgttttgctgagttctgtgagtagcttgatctaattattgaacttgaggaaggctgtgggagtccccattttttttcttttttgagacaaagtttcgctcttgttgtccagtttggagtgcagtgccgtgatcttggctcaccgcaacctctgccttccgagttcaagcgattctcctgcctcagcctccctagtagctgggattacaggcgcccaccaccatgcccgtctaattttgtatttttagtagagacggggtttcttcatgttggtcaggctggtctcaaacgcccgacctcagttgagccacctgccttggcctcccaaagtactgggattacaggcatgagccgccgcacccattgggagtccccaattttttttttattatactttaagttttatggtacatgtgcacaacgtgcaggttagttatatagtatacatgtgccatgttggtgtgctgcacccattaactcgtcatttaacattaggtatatctcctaatgctatccctcccccctccaccccacaacaggccccagtgtgtgatgttccccttcctgtgtccatgtgttctcattgttcaattcccacctgtgagtgagaacatgcggtgtttggttttttgtccttgcgatagtttgctgagaatgatggtttccaacttcatccatgtccctacaaaggacatggactcatcattttttatggctgcatagtattccatggtgtatatgtgccacattttcttaatccagtctatcattgttggacatttggcttggttccaagtctttgctattgtgaatagtgctgcaataaacatatgtgtgcatgtgtctttatagcagcatgatttataaacttttgggtatatacccagtaatgggattgctgggtcaaatggtatttctagttctagatccctgaggaatcgccacactgacttccacaatggttgaactagtttacagtcccaccaacagtgtaaaagtgttcctatttctccacatcctctccagcacctgttgtttcctgactttttaatgatcgccattctaactggtgtgagatggtatctcattgtggttttgatttgcatttctctgatggccagtgatgatgagcattttttcatgtatctgttggctgcataaatgccttcttttgagaagtgtctgttcatatcctttgcccacttgttgatggggttgtttgtttttttcttataaatttgtctgagttcattgctgattctggatattagccctttgtcagatgagtagattgcaaaaattttctcccattctgtaagttgcctgttcactctgatggtggtttcttttgctgtgcagaagctcttgagtttaattagatcccatttgtcaattttggcttttgttgccgttgcttttggtgttttagacatgaagtccttgcccatgcctatgtcctgaatgatattgcctagattttcttctagggtttttatggttttaggtctaacatttaagtctttaatccatcttgaattaatttttgtataaggtgtaaggaaaggatccagtttcagctttctacatatggttagccagttttcccagcaccatttattaaatagggaatcgtttccccatttcttgtttttgtcaggtttgtcaaagatcagatggttgtagatatgcagcattatttctgagggctctgttctgttccattggtctaggtctctgttttggtaccagtaccatgctgttttggttactgtagccttgttgtatagtttgaagtcaggtagcatgatgcctccagctttgttcttttggcttaggattgacttggcaatgtgggctcctttttggttccatatgaactttaaagtagttttttccaattctgtgaagaaagtcattggtagcttgatggggatggcattgaatctataaattaccttgcggagtccccaatttttaaacagtagctcagaagcatagatgagcctatggggtttgtcactggcatctggaatgaggacaatgttgtgggactgagatctgaatcagggtctatgctgactctgggtggtgtcagaattgaaatgttagacactgagttgctgtttgagaattgcttggtgttcagcaaactctacagatttggtggcagaaggaagatatcccagagccctgtcctggtataaaatgagtgtctgcaaatgggaggctcttctctcctgcacacaggctttcacactacctattgtcttgggatcccagggctcctgccaggattgaagaggatgaaaacttcaaggaaaggagctctgatgacagacccccttttcacaaagctgccaccacaggattcccacccacacccaaatatgcccactagacattgatgtatccacacctctcccagcactaggcaccaccctcaggaatttcactatagcattgttgattttagtgtttcttgacaaaaacccacaaaagtgtctacaagtctcctggcatatccccacatgcagacgctgaatctgccacagcaacctgttttccccaccaagctagggttctgggccacctgttcataatctcatctgcctacaggcacacagaaataaatcagagtccagccccacctgggccaccatctgtagaacaaacaactccttgcacctacattgcactcttccccacgcatggattttttttttcttttaacttttctttttggttaaggggtccatgtgcagctttgttatataggtaaaattgtgtcatgggagtttggtgtagattgttttgtcactgaggtactaagcgtaaaaccgaacaggtatttttttctgatcctttttgtcctttcgttctgcattctcaactaggcctcagtgtctgtcgttcccttctttgtgtccatgtgttattattatttagctcttataaatgatagcatgcatttggttttgtttcactttagctttctaaggataatggtctccagcatcatctatgttgctgcaaataacttaatcttgttttttttttttaatggccacataatcttccatgatgtttatgtaccgtactttgttttttattaaatcttctattttatttaattaatttatttggagactgtgtttcactctgtcacaaaggctgaagtgcagtggtgcaatcttgactcacttcagcctcaaccttccaggctcaaggcaccctcttacttcagcccccaaagtagctgggactacatccatgcaccaccatgcccagctaacttctttttctatcttttgtagagatgagttttgccatgttgcccagggtggtcttgaatgcttgagctaaggcaatccacctgcctcggcctcccaaagtgctgagattacaagtgtgaaccacctcacccaaccataccatattattttaatctagtctaccattaataggcagttaggtttgttttgttttatgtctttgtttgtttgtttgagatggagtcttactctgtcacccagactagagtgcagtggtaccgtctcacctcactgcaacctctgcctcctgggttcaagcaattctcctgcttcagcctcccatgtagctgggactgcaggcatgtgccatcacgcccggctaatttttgtatttttagtagagacagagttttgccatgggattattgtatgcagcctattattgactttctaattacagccattctgattggtgtgaggtggtatctcattgtggtctttttttgcttgttttttgcatttctctagtgattagtggtgagcatttgttgcacatgcttgttagccacgtttgtcttcttttgaaaagcatctgttcatgttttttgcctacttttttttctttttttttagacagagtcttgctctgtcccaggctggagtgtagtggtgggaccttggctcactgcaacctctgcctcctaggttcaagctattctcctgcctcagcctcccgagtagctgggattacaggtgtgcgccaccacgcctggctaatttttttggatttttttagtagagacggggtttcaccatgttggccaggtttcaaacccgaccccatgatccgcccgcctcggcctcccaaagtgctgggattacaggcgtgagccaccgcacccggccatttgtctactttttaatgaattttttttttttttttgctctgtattctgctgccttgttctgcgagtctgtttttgtaccaataccgttctgcttttgttaccgtagccctctagtgagtgtggtttgaagtggggtaatgtaatgcctccagctttgttctttttgcttaaaattgccttggcaattcaggctcattttggttccatataaattttaaaatagttattttttagttaacagcgttttggtagtttgatacaaatagcattaaattggtaaatgtctttgggcagtttggccattttaataatattgatcttttctatctgtgagcataacatgtttttttaatttgtttgtgtcatctctgacttttgttgttcttgagacagagtcttgctctgtcacccaggctggagtgcaatggtgcgatctcagcttactgcaacctctgcctccctggttcaagctattctcctgcctcagcttcccaagtagctgggattacagtcacatgccaccatgcctggctaattttttttgtattttaatggagacagggtttcaccatgttggtcaggctggtctcgaactcctgacctcatgatccgcccacctcggcctcccaaagtgctgggatacaggtgtgagctactgggcctggccatctctgacttctttaagcagtattttgtcattcttgttatagagatctttcacctccctggttagctgtattcctagatattccattctttttgtggcagttgtgaatgggattatgtttttgatttggcttttggcttggatgttgttgatgtaaacggatgccattgatttagtaccctgaaactttgctggagttgtttatcagtttaaacagctttttgctgagactgtagggttttgaagatatagaatcttgtcatctggacataaggatagtttgacttcctctcttcttttttggatgtcttttattttaatctttttcctgattgctttggccaggacttccaattctgtgttgaataggagttttgagggaaggcattcttgtcttgtgccagttttcaaggaggaatgcatccagcttgtgtccattcagtatgttggctgtaagtttgtcatagatgactcattattttgaagtatgtaccttcaatgcctagtttgttgagggttttaagcatgaaggatgttaaattatattgaaagtgtttttagcatctattgagataatcttgtgggttttgtctttagttctgtttatgtgatgaataatattcattaattgttgtatgttgaaaaaaccttgcataccagagatacagcctacttgatcacactggattaacttgatgttctcctggatttggtttgccagtattttgttgagaaagttttcttcagtgttcatcaaggatattggactgaagttttctattttttgttttatctctgccaggttttggtatcagaattctatatagaattatgatatatatatatagtatacaaaaagagtatactattctttttgttgttgttgttgttgttggaggcggagtctcactctgttgccaggctggagtgcagtggcgcgatcttggcttaccacaacctccacctcccgagctcaagtgattcgcctgcctcagcctcacgagtagctgggactacaggcctgggccaccacacccaggtaatttttgtatttctcgtaaagacgggttttcaccatgttggccaggatcgtcttgatctcttgacctcatgatctgcccacctcagcctttcaaagtgctgggattacaggcatgagccactgcacctggctgatgctattcttatataatgagttgaaaaggagtcccttttactcagtattttaaaataattttggtagaattgataccagctctttgtacatcaggtagaattcacctgcaaatttgtctggtcctgttctttttttggttattaggctatttattactaattcaattttggaacttgttggcctattcagggattctgttttgttgctgttgttattgttcagtctttggaggatgtatctttgctccaaggttgcagtcctaaacttggcccaaatgaactctctacttatattcatgttgcctcagcctttttttttttttttttaggtagacatattacttagagtatgctagaacagcctctatgaggagatttttcctttgattgtactttacttgatgtaacacccaaggatgcaagccaggttgatcccacctagaatctgcacataacatcttgcttctgcctgggattcacaagacagggccagactttggattgagaatatacagaaaaccaataggaggcattttctgcattgtgagatgtcaacatagacatctgaaaccccgctttgagaatgtggctttttaagctttttagatcttgttcaatgacctgttacagttatgtaagaggctccaggtgtaaatagagtctgatgacagaatctttaagtttaaacaagcatcttaagagtgagagatcaaggccacaaaatatccagagccatgacaaccacaactatacctacgtgtaaaatgtcatgctggagcagagtattcttgtccttcctcttacccaaaagtgaatgaatcaggataggtgatccaggttctggagctccaccagagcagttccattttctatttagaatcagcctgagtctctccatcctggcttatcagtgggccctcagccgtggatcactaagaaccgtctcacaatcacctaggcatctttgagacatttgaggatgtccagggcagaactgtgtcaggctgacaagagtgattaattctgcttctctcagtataagagaaagaagtaatcctgtgttttttactcccttcatataagaggtcactttagttggtaccaagatgagagtttctccagtttcctagtacttaggtgaaagacaaagaggaggtcttgtgactcaaataaactaattgcttccatttcatatggtcattcaaaacatagatgaaccaggtgcggtggatcatgcctgtaatcccagcactttgggaggccaaggtgggtggatcacgaggtcaaaacatcaagactatcctggccaacatggtgaaaccccatctctgctaaaaatacaaaaattagctgggcttggtggcacgtgcctgtaatcccagctactcaggaggctgaggcaggagaatctcttgaacctgggaggtggaggttgcagtgagctgagatcatgccactgaactccagcctggtgacagagcaaagttccatctctaaataaataaataaataaataaataaagcagtcatgatccctaccatccaggaacttttagtctagactagcaactgggtacatggttgaattaagtattgtatggttagtacaatgaatagatgtgtacaaaaaaacttgagctttatttgggccactttttttgtattgttgtgacttctgatatcatctgaagggatatttatggacaggagaattttattattattcgtgtttcttttaccttgctaagaatacatatatatcatctgataaaattatcctagaaaaccttgagagatttgtttaagttgcttattattatatgttataacattgaaagggcagattaaagttacataaactctgggattttagtttctcttaggtaaacttaggaaaaactgaactggaaataccccagtggcatagagaacagaattctacagagggtccagtgcctaacccaggtctgttttgtttgtttgtttgtttgtttgtctaagatggagttttgctcttgttgcgcaggctggagtgcagtggcgcaatctaggctcactacaacctccacctccctggttcaagtgattctcctgcctcatcctcccgagtagctgggattacaggcttgcaccaccatgcctggctaatttttgtatttttagtagagagaaggtttctccatgttggtaagactgatctcgaactcccgacctcaggtgattttcccacctaggcctcccaaagtgttgggattacaggcgtgagccaccgcaccaagcgttcaccccttgttttttgtttttttgttttttgcttttttcagttggagtcttgctcttgtttcccaggctggagtgtagtggtgcaacctcggctcactgcaacctctgtctcccaggttcaagtaattcttgtgcctcagcctcccaagtaactgggattacaggtgcctgtcaccacatccagctaattgtgtgtgtgtgtgtgtgtgtgtgtgtgtgtgtgtgtgtgttttcttgaaatggagtctagctctgtagctcaggctggaatgcagtggcatgatcttggcacactgcaacctccatctatgggagtcaagcgattgtcctgctgcagcctcctgagtagctgggattacaggcacctgccaccatgcccatctaatttttgtatatttagtagagacagggtttcaccatgttggacaggctggttttgaactcctgacctcaggtgccacctgcctcaccctcctgaagtgctgcgattacaggcatgagccactgtacccggcaatttttgtatcttcagtggagacagggtttcaccattttggccaggctggtcttgaactcctgacctcaggcgacttacccacctcagcctcccaaagtgctgggattataggcatgaccaccacacccgaccagattcaccctttttggagcccttatttaggtctggccccaccctggagtcttgcatcacaaagctgatttaaaaagatgagagtttttgctggtgaatcctgctgcctttctagagctggtgctcaaaatttcagaaacccaaaagcaggtaaatgagaaaaataaactgtatattttgggatcctaatttttaagttttgtgttaaaaccagtgcttacagaaatattccatttagcaacttgttttctattcctgcagatccagtagttgctccacaagtaacaaaaaagtaaatataaacacaataaaaatttctctaaactacattaaattctctcattctgtatccctcctatctgtctatatttagcttttattctatacattttatttttaaaaatgacagagaaacagatgaagaaataaaaatgctgaaccctttatctaaatcctgggaattattgaacacttagagtcaacttccagggtgttatgaggattaagtcacataatgtgttattccccacatagtgctctgtaacatactcttgagcagatagtacctgcttaataaacattgcattattacatgtttacatgttgtttttcaaatgcagaattattctgaaattgctgctttctgtttcctctgtaaactttaaagagccagcaaagaatacgaaacgtttggatggagattggttgtctccatttgtaccagaaatatttgtgttgtgacaacagagctgagtgtaagggactctgtgctgtgcccgctttctctaactactgctaataatgaacccaggggtagcaacatcagcattggcaggggacttgtttgaaatacccattcatggactttttccaaacctgcagattcacattacatagattgggaccaaaattcccaagtaatgttggttttttttgagacggagtctcgctctgtcacccaggctgaagtgtaatggcacgatctcgtctcactgcaacctctgccctctgggtttaagcgattctcctgcctcagcctcctgagtagctgggattacaggcatgcaccaccacgccagctaattttttatttttagtagagatgaggtttctccctgtttgtcaggctggtcttgaactccagacctcaggtgatccgccccactctgtgtcccaaagtgctgggattacaggcgtgagtcactgctcctgatcctattaccaagtaatttttaagctcattaaagcttgagaggcagtgcttatcagcccacttctctcattaggattacacggtgaaatcctgactctactaaaaatacaaaaattagctgggtgtggtggtgtgtgtctgtaatcccagctactcaggaggctgaggcaggagaatcgcttgaacctgggaggcggatgttgcagtgagctgagattgcaccattacactcgagcctggtaagagcgtgaaactccatctcaaaaaaaaaaaaaaaattgcagaaatctctttacttgtgccctttccacagtttctatttattgttctgggtggaagcatccatgttgttttaatgaagggcctcatgtgactctaagctgaggccagaatcaaatatgagggcttcaaaatacattcatgagagtgaagtgccacctttgtactaaagggtggtcacagggcccgttcagtttgggtttggtagggacagggcagtgtggtgcatatttccattactgtagcagaatttgctggtgtctgtggcaggggagggcacctgtggacaggaaaagaggaacacttttaatatggcagatcatatttttatttccatggagcagctcattttttcctgaatctcttctgttataaaggagagaaatgcatggactttttggtcttggtccttctgtgtgtgggcgtgacactagtaggtaagcaggtggtgctgatgcttttaagggaattttctcaagatgcaggtgttacttgtccagagaattttatctgaaaaggatttccagagaaggaggagaaagaggaataatggcttcttttcagctaaacatgtctcagatcaagagctgtgtccactctgcctcctggagtgccatgtgtttagtacttggaaaccttctctgcttgtgtttttcctccccagtgagtttgtttcaggtactttaaaaaattcttgtaatagtcaagggtctctaaaaaatatttgtttctggctgggcgcggtggctcatgcctttaatcccaggattttgggaggccgaggcaggtggatcacttgaggttgggcgttcaagaccagcctgaccaagatggataaaccccgtctctactaaaaatacaaaattagacaggcatggtagcacatgcctgtcatcctagctactaggaggctgaggcaggagaatcacttgaacctgggagacggaggttgtggtgagccgagatcacaccattgcacttcaccctgggcaactcaaaaaaaaaaaaaaaaatgttttcctatgcaccagacccttctctacatcatggcttcttatatgcaatgcagaattcctaccatgaatttatgatctgccatattaaaagtgttccttttgtggctgttgaacatgggaagatgtggatactcaagattcctactggggaaaagctggggtccttagtaaagatggagaacatataatgttgtggtttcatctaaacccaggaagttgtgaaaaaattattaagagatacctgctctctagagtgctaaagaaagactacttaaaatcattattaaaattatggaatgcgggagatatcttgacctttgcataaaactgattttttaatggttaaattcagtctataattgactttttgaggggcaatatctcagcagtgatgctgtgttcttctgtgtgcatcagcacatcatagaaatttgttctagtgtagttgatgttaataatttacttggttaaagagctctgtgactttttttcactatagagttaattatttttatctttattattaagtatctttatacagctaatgtgcataaaccatcacaattaatctggtgcctgcccttttttcttaggtttttttgtttttgtttttttttgcatgtgtctgtctttggaaaatgaagacacttgactttgtttacaagccagaaacattgggaaaaacacagtctctttcacttgcctaatgtttgacaaaatagtcttcctgggataaaaacattggcattactagtgacctttttagaattttaaaaactcagactttattccagatcttctgaaaaatataaaaaaatcttcatggcaggatctccagtttatcgtgcacatttaaatttgagaggtaccttctgactcaacatgtttttctttgtctgaaaaatatacacaactcattatgatgtaagtatagcactcaataatgtatatgtttgtgtttgtgtccttaattatatactttatcatccagagaagtatcatatatgcactggtgttgtggatcttaggccattctctgccctcagagtaggagaatacattagaaaatatttctgtgttaaaaattattggataatttcagttattcttataagtcagaatcagttctctttactctctcaattcaccttaattcaaataataaattctgcccatggccacttggtaaatatatgtgtgtctctgtgcttgtgtttttcaggagacattgacatttagggatgtggccatagaattctctctggaggagtgggaatgcctgaaccctgctcagcagaatttatatatgaatgtgatgttagaaaactacaaaaacctggtcttcttgggtgagaataactttcatacacaattcttaatatgccctaaatgtttcatgtctctttttttgtagaatttttttgataatttatgctttgtataaatgagtttctaatcccagttttcaagaaaatcttgatgatttgtccgtgtggaaaagaatttcttcaacgtgtttcatcttgatctgaactttccacattcctgagctgatgtgtatccttcactctagattagtgataattccagaaatttagtggcataaaatatcactgcccatatcttaaaatctatttgccatcaccaatttttgattcaggtagtaaaattaaaaacctacaaatttaaaatattttctaaatagttagagatgtctctctttaatcagtattttcagattaattttattttatttatttatttttttgagatggaatctcaccctgtcacccaggccggagtgcaatggtgcgatcttggctcactgcaacctccaccctgggttcaagcgattctcctgcctcagcctcccaagtagctgggattacaggtgcacacctccacacccagcaaatttttgtattagtagatacagtgtttcaccacgttggccaggctggtctcaaactcctgacctcaggagatctgcccacctcacccttccaaagtgctgggattacaggcgtgagccactgcgcctggctaaaacacttttttttttttttgagatggaagtttgctcttgttgcctaggctggagtgcaatgcactatcttggctcactgccacctccgcctcccgggtccaagcaattctcctccttagcctctggagttgctgggactacaggcacctgccaccatgcccagctaattttgtatttttagtagagatggagtttcaccatgttggacaggttggtctcaaactcctgacctcaggtgatctgtccgtctcggcctcccaaagtgctgagataacaggtgtgagcaactgcgcccagcctttggattaattttctaaaatattctatcacatcctttttactgagcacagtactaggttagtaattagagaatataggcaagattcatgttatttatttttaataaagcaggtgttgctgtctctaagcaagacccagtcacctgtctggagcaagaaaaagagccctggaatatgaagagacatgagatggtggatgaacccccaggtaggtgagagtgaaaaaaaacagatgacacagatgagaggtccaaagcttaaaaaaaaaaaatgtgccagtccttacaatgtgttttgggaagctgtgttataaagcatgtagtttctgggaggcctgaatattttcttaaaattttttcttacatagggacatcttctgtcttatgcttttaaattctctaagaattctacttttccttgggggatcttccttcaagtctacaagagagccaaagcatattgtcatagcatataaaagactgtcatggcatataatctgactgcttttttattgttttgggggacgcacaaatatctgtataattttgaaaaattctttgttaaattattttttagttctctttttgaatcctgtctgaaatatgtgagagtagtgatttctgttccattaggggtttcttgttaatttttttgcatatttcatcctgtttgtattactatagtcttaaaatatagtttgaaattataaattatgatgtccctctgctttgttcttttttctcaagaatgctttggctatttgaaatttattacaatttcttgtaaattttagaattgtattttctattgtgaaaaaaataccactggaattatcatggggagtttattaaatgtatagattactctagataatatggcattttaacaatattctttcaatccaagacatgaattttttttttttttgagacagaatctcactctgtcatcaggctggagtgcagtggcacaatcttggctcactgcaacctccacctcctgtgttcaagcgattctcctgcttcagccttctgagtagctgggactacaggcatgtgccaccacacatagctaattttttgtatttttaatagagttggggtttcaccgtgctgttcagactggtctcaaactcctgaccttgtgatctgcccacctcggcctcccaaagtgctgggattatgggtgtaagccactgtgcctggccaacatgaaatattttaaaatttatttttgtcttctctaatttttttcattgatatatatttcattgtaaagattttttaccttcttcgttatatttgttctcagaaatttattttaatgctattattaataagactgttttcttcctctattgtatcagatagttttaagtgtatggaaccataactttatgttaattttatattttgttaagttactgactgtatttattagtttagacaaatttttcttttttttcttttttgagacacagtctcactgtgttgcctaggctggagtgcaatggcataatctcagctcactgcaacctctgcatcctaggttcaagcgattctcctgcctcagcctcctaagtagttgggattacaggcactcggcaccagcccagctaaatttttttttgcatttttagtaagacggaatttcactctgttggccaggctggtcttgaactcctgaccttgtgatttgcccccctcagcctcccaaaatgctgggattacaggtgtgaaccactgcgcctggctgtttagacaaattttaatgtactgtttatggtttttttatatataagatcatatgatccacaaacagcaactttttacttatttctctttaattccaatggcttttaaaaaatgttcttgactaattcttgtgccacatactttcagtgctaccttaaaatagaagcattgacaatgggcgcaatatagttttatattggtatctgtgaatttgaaggagcaaacaactccttagcttttataaacaggtttcaggaggtaaagatctttttctgttgtgtccctagggtgatggaatgccctctgggtttgtagtgaagaggggttgtagctttgtcacaaggctgctgggtctgcactagagtccacctttagatggcttgtcacaagggcttgggtaattgtaattcccattttatttttggacagattgtatatattctttaagactttgatctgtagggcagataccagggcagatttctgcagttggctccttatataatggccctatcaggatgtgaatgggtttgcctttcactgaataccagagaggatttcttcaggtcactgtgtgggtttctgtttaggaaaaactgatcatgatctgcggctcagagagctggaactgagtcaataaactgcttcagggaccacagtaaaaaccaaggtctgtaaacctgtctgcatggctgcaaataggtgtcttcctccaggtctctggaagggcaggacctctcttagactgtaactgggaggagtttgggatggttacagagttaatttcagaattctctgttggaccaagttgggtggaccatttcttgatctgtagccaaaaccaagggtcctgtaatttcccacacgaataagtgcctgtcctctgaaaaaacactcctcaatcttgggctttagcagagtttcacaactccctccctgcatctcaaagctctcttaaaggcacttactttggagatgggatcttgtttatcatctggtctggaaatccaggcctgcagcaattctccaacctcaatgtaccatgtagctgccattaaagatgtgagccatgatggctggctgtctcatgaaggcattttttgtcagggatgactgaataaatttttttttgtggcgaggataatcaaatagagcaccttctatttttttatgtcactgatgttactctttctatacatttttactttcgattttccatttcaaacttctctgtcattttagattcagacatttaggacaatatgctagaatttacatgttatgcctgaagtaaattagataattggtaggcactccatattactaagatggttacttataaatttaagttcgctgcaggtaaaaaggaattataggattttcacccactttcttcagcatatatctaaatgataacataatttctttcttttcttttcttttcttttttttttcttttcttttcttttctttctttatgagatggagtgtcaatctgtcacccaggctggagtgcagtggcatgatctcagctcactgcaacctgcacctcccaggttatagctattctgctgcctcagcctcctgaatagctgggactacaggcgtgtgccaccacatatagttacttttttgtatttttagtagagtcggggtttcaccatattggccaggctggtctcgaactcctgaccttgtgatccacctgcctcggcctcccagattgctgggattacaggcgtgagccattgtgcccggcccaacataatttatttctaaatatttgttttacatatcagaggctgtaaccctactttgcaaaatatacgtttaaatttagcaatgtaatgctattctttgcttctaaagttgaattacagtggtttcaattttgtgtaagaatagcatatatttaaaacgtaaaatttatcatattttttacatgcttatttaaaaagtttcttattagactattctaattatactgcatattctgtgaaattttactgccatacagtgcatgccaatgattcaaaatacctgccttccctgagtacacagtcaactattgtagttatctagacaattcttttttaatggtactttaatgttgcataccagattttatgagtaaacatgtctcttattacgcagtttcttattagcgttttttcagtataggtttcttaacatcagcttgttgtgttttttagtttttcttatataattttagccaatttgcaattctgtttgtatactttaagtcaatgtgaggtgtaattaagagataagtcagccatacgtctatcacgatcagattatatgtgtgtgtgtttatctataaatatgaccccaatattggttatgacttatctcatatatattctttcttaactgattttcagtggctgttttatcttgtctaagtgagtagtcatgaaaatattttcattatgtcttattttcaccatgtttctaatgatgaatatatatatatatatttttttttttttttttttttttttttagacagagtctcgccttttcgcccaggctggtgtgcagtggcacaatctcggctcacggcaacctccacctcccgggttcaagtgattctcctgcctcagcctcctgagttgctgggactacaggcatctgccaccatgcccggctaattttttgtatttttagtagagatgggatttcaccgtgttagccaggatggtctcaatctcctgacctcgtgatccacctgccttggcctcccaaagttctgggattacaggcatgagccaccgcacctggcctgaatatatattttctttgtgtgagaaaaacatttttgtgatttgaaggatattttgagaagatttataattctgtatttttttctgtttttcctttagaaaaattaattgttgtaaaaacataacaggccagtcacggtggctcatgcctataatcccagcactttgggaggcagaggcaggcagatcacttagggtcaggagctccagaccagcctggccaatatggtgaaaccctgtctctactaaaaatacaaaattagccagacatggtggtgtatgtgtgtaatttgagctatacaggagactgaggcaggagagtcacttaaacccaggagacagaggttgcagtgagccgagatcatgccaccacactccagcctgggtgagagagcgagattccatctcaaaaaaaaaaaaaaagaaagaaaaagaaacaataaaaacacataacataaaatttagcatcttaaatctatttaagtgcacatttcagggccagacatggtggtggctcacgtttgtaatccctggattttgggaagccaacacagcagtatcatttgagccccaaagtttgagactagcctgggcaacatatggagatttcctctctataaaaatttttaaaaatatctaggcatagtgttatgcacctgtggaccccgctatatgggagatttagggaggattacttgagcctaggagtttgaggctgaagtgagacataattgtgccgctgcactttagcttgggtgacaaagtggaccctgtcttaaaaagaagctgtacatttcagggatgttaaatatattcacattgttctgcaaaagacttctagaaatttcacatgttgtgaaactaaaacccaatatccatttaagtgacaagatgccattttaccctctccccagtgcttgacaaacacccttccactttctgtttttatgagtgtgactacttaagctatctcatataagtagaattatatagtattcatcattttgtttctggcttatttcaagtgacataatattttcaaagtttatcttaaaatgtgacaagatttctttgataatatttgatttaattatgaaaacatttgatctttgatttctgtgatatttcattgaatatatatgtttcatttttgatgtgtttataaattaagagacacctgggttgcttctgccttttggcttttgtgagtaagggtacaataaacatggatgttcaaatatgtcttctaggtcctgtgttggatagtttggatatagcttcgtaagagtgggattgctgtatttgataattccattgttaattatttaagaagcatgtataacatttttaaataatggctgcttccttcttttctaccaacaatcagcataggctttattttcattgtatcatcaacagattttgtgttttaaaaaacatgtagtatatttttaaacatatagtatagtggccattgtaatgagattttatttctttattattttttattttttgagatggagtcttgctgttgtcatccaggcctgctgttgtcacccaggcaattggcacgatggctcactgcaacctctgcctcctgggttccataaattctcctgcctcagcctcctgagtagctgaggttacaggtgcccgccaccatgccaggctaatttttatatttttagtagagatggggctttcacagtgttggccaggctggtcttgaactcctgacctcagatgatccgtccacctcgacctgccaaggtgctgggattacatgcgtgagccaccacgcctggcctcatttttatttttatgagtttctctacaaatcattaattttgcttttcttttcaaatggtttttcccatttgaatatcttttttgatgaaaatttagttcaattattttttctttctttggttttttttcttttttttttgggagtctcactctctcacccaggctggagtgcaatggtgcaatctcgacgcactgcaacctctgcctcctgggttcaagcgattctgctgcctcagcctcctgagtagctgggattacaggcgccaaaattactctttgtcttccaccatgattgtaagtttcctgagaccctcaccggaagcagatgctgttacatccttcttgtacagtctgctgaactgtgagccaaataaaccttctttctttgtaagttacacactcaggtattcctctatatgcaaaatagttaatacagtctataatgcctgttttctgttttcttactgatattttatctgaattttctattattgcaaatgatgtcttgatcgccacaattatgttgctatgtatttcttccttcacctttgtcaacgtttgctttatatattttggagcccttatgtcatatgtatgtatacatataaatagatatgatagttacagattcctggtaaattgactcatttgaccgttatataatatcgtgtttgtcctatgctgttacatacaagcatatgtcctatgctgttatatacaagcatattatatacaatataattattaccacctcacccaattgtggttactatttgcatggaatatagattttttcagttctgttactttcaacctatttgactcaatgctaaaatgcctctcttatagacagcaaattgtatactttttaacttaagctactaaggcatcttatttctttttctttttataaatgtatgtatgtatgtatttatgtatgtatttttatttttatttttttgagatggcatctcgctctgtcacccaggctggagagcaatggcatcgatctctgctcactgcaacctccacctcctagattcaagcgatattccttcctcagcctcccaagtagctgggagtacaggtgtagtggctaatttttgtatttttagtagagacggggtttcaccatgttggtcaggctggtcccaatctgacctcgtgatctgcccgccttggcctcccaaagtgctgggattacaggcatgagccgctgcacctggccaatgtatttatttttgagataaagtctcactctgtcatccaggctggtttgcagtggcatgatcacgactcactgcagcctcaacctcccaaactcagatgatctcatttcagtttcttgagtaactgggttgcaaatgtttgccatcccaaaccgagatagttttttgtacttttttctgtagagacagttttttgccctgttgtctaggttggtctcaaactcctgagttaaagtgatcagctcccttggcctcccaaagttctgagattacattatttttattaagtaatttaactaatttttaaaatgactgcttaaagatataaagttactattaccagttttattgttgttctttttttaagtttaatttaatttaattttatgttccaggatacatgtgcaggatgtgcaggtttgttacataagtaaatgtgtgctgtggtggtttgctgcacctattaacctctcacctcggtgataagccctgcatgcattagctatttatcctgattctctccctccccgtgacagaccccagtgtgtgttgtttccctccatatgtccatgtgttctta

SEQ ID NO: 537 - DNA, 1794 bp, Homo sapiens
ataaatctgtattttgtttttcgtaatggctatcctcatttacgttcacaccaacagtgtgcaaggattccgttttcttcacatctttaccaacacttttttctttttcttttaataagagttattctaacaggaatgagttgatatagggattttttttttggcttgtctttttgtgataatagtcaacattgagcatttaaaaatatatccgttggacatatgtatgacttttcttgaaaaatatttatttcagctatttcctttttttttttttttctttttgagatggagttttgttcttgttgcccaggctggagtgcaatggcacaatctcggctcactgcaacccttgcctcccagatcaagtgattgtcctgcctcagcctctcaagtagctgggattacaggcaaatgccactgcgcccagctaattttgtatttttagtagagacggggtttttctatattggtcaggctggtctcgaacttctgacctctggtgcccacctcagcctcccaaagtgctgagattacaggcatgagccaccgcgtccggcctattatttttaataattttttattgttgtcattttaaatacacttttgatattaacctcttgtcacatgtataatttgcaaattttttctcccatgttctagttgtcacattctgttgattgtatcagattttgtccagcagctttttaatttgaagtgatctgacttatttttccttttgtgtcctgggatgtttaggttaaatcaaaaaacttgcggccaggcgcagtggctcacacctgtaatcccagcactttgggaggccgaggcaggtggatcacgaggtcagaagttcgagaccagcctgaccaacatggtgaaatcctgtctctactaaaaatacaaatattagccgggcgtggttgcacgtgtctataatctcagctactcaggaggctgaggcaggggaacggcttaaacccagaggcggaggttgtagtgagccaaggtcatgccactgcactccagccttggcaacagaatgaaactctgtctcaaaaaaaaaaaaaaatttgctgcccagaacaatgttatagggcttttgctttatattttggcagtagtagtttcagagtgtcaggccttacatttaagtactaatttatttcgagtttatttttacatatggtgtgagatgagggtctcaatttttatctctgcatgtggatataaagttttcttaattgaagattctgttctttccctttaaagtcacctgtatttaaaatcaactgtaaatacatggatatatttctgctgtttttttcttctgctccattgacctatgtctctgtttttattcaagtaccatactgttggttaccatagctatgtagtgtatttcaaagttagtcacttattttgtcttgattgctttggctattcagggtcttttgtgataccatatgaattttagatatacttttaaaacttttctatgaagtatatcacgtatttcgatagaggttgcattatacctgtaggtcattttgtgtaatacaaatattaatgtcagttcatgaatagtccatttatgtattaatttctatttagaatgtaaggcgtttcaactttttggttaaatttatttcaaactatagttattgtagatgtaattgtttttgaatttcattttgggatagttattaatgtagagaaatgctgtgactttttgatggtgcttttgtattttgaaagtttaataaattttgtttatttatttatttattttga

SEQ ID NO: 538 - DNA, 530 bp, Homo sapiens
ctaagtcaacataaaagaattcatattagagagaattcttaccaatgtgaagaatgtggcaaagcttttaaatggttctcaacccttactagacacaagagaattcatactggagagaaacccttcaaatgtgaagaatgtggcaaagcttttaagcagtcctcaacccttactacacataagataattcatactggggagaaaccatatagatgtgaagaatgtggcaaagccttcaaccggtcctcacaccttactacacataagataattcatactggagagaagccctacaaatgtgaagaatgtggcaaagcttttaaccagtcttcaacccttagtacacataagttcattcatgctggagagaaaccctacaaatgtgaggaatgtgacaaagcttttaatcgattctcataccttactaaacataagataattcatactggagaaaaatcttacaaatgtgaagaatgtggcaaaggctttaattggtcctcaacccttactaaacataaaagaattcatac

SEQ ID NO: 539 - DNA, 1793 bp, Homo sapiens
ataaatctgtattttgtttttcgtaatggctatcctcatttacgttcacaccaacagtgtgcaaggattccgttttcttcacatctttaccaacacttttttctttttcttttaataagagttattctaacaggaatgagttgatatagggattttttttttggcttgtctttttgtgataatagtcaacattgagcatttaaaaatatatccgttggacatatgtatgacttttcttgaaaaatatttatttcagctatttccttttttttttttttctttttgagatggagttttgttcttgttgcccaggctggagtgcaatggcacaatctcggctcactgcaacccttgcctcccggatcaagtgattgtcctgcctcagcctctcaagtagctgggattacaggcaaatgccactgcgcccagctaattttgtatttttagtagagacggggtttttctatattggtcaggctggtctcgaacttctgacctctggtgcccacctcagcctcccaaagtgctgagattacaggcatgagccaccgcgtccggcctattatttttaataattttttattgttgtcattttaaatacacttttgatattaacctcttgtcacatgtataatttgcaaattttttctcccatgttctagttgtcacattctgttgattgtatcagattttgtccagcagctttttaatttgaagtgatctgacttatttttccttttgtgtcctgggatgtttaggttaaatcaaaaaacttgcggccaggcgcagtggctcacacctgtaatcccagcactttgggaggccgaggcaggtggatcacgaggtcagaagttcgagaccagcctgaccaacatggtgaaatcctgtctctactaaaaatacaaatattagccgggcgtggttgcacgtgtctataatctcagctactcaggaggctgaggcaggggaacggcttaaacccagaggcggaggttgtagtgagccaaggtcatgccactgcactccagccttggcaacagaatgaaactctgtctcaaaaaaaaaaaaaaatttgctgcccagaacaatgttatagggcttttgctctatattttggcagtagtagtttcagagtgtcaggccttacatttaagtactaatttatttcgagtttatttttacatatggtgtgagatgagggtctcaatttttatctctgcatgtggatataaagttttcttaattgaagattctgttctttccctttaaagtcacctgtatttaaaatcaactgtaaatacatggatatatttctgctgtttttttcttctgctccattgacctatgtctctgtttttattcaagtaccatactgttggttaccatagctatgtagtgtatttcaaagttagtcacttcttttgtcttgattgctttggctattcagggtcttttgtgataccatatgaattttagatatacttttaaaacttttctatgaagtatatcacgtatttcgatagaggttgcattatacctgtaggtcattttgtgtaatacaaatattaatgtcagttcatgaatagtccatttatgtattaatttctatttagaatgtaaggcgtttcaactttttggttaaatttatttcaaactatagttattgtagatgtaattgtttttgaatttcattttgggatagttattaatgtagagaaatgctgtgactttttgatggtgcttttgtattttgaaagtttaataaattttgtttatttatttatttattttga

SEQ ID NO: 540 - DNA, 899 bp, Homo sapiens
tggattttctaatgtaagaaaatgttgctgttagtaaaagtttcctcagtgtgccagaaagcagatggtggcagtgaatagtgttttcttttgccaggttttgtatatgctttctaaacctgcaagagattttgcttttccagattcagatttctgatcttttttattttaaaacagaaatagaaacttatatttaaatgtacttgcatcatgtggtctgtttgacatattatggttacttgaaaatgttgagtaacatttgatgttctgcatgaatttcttctctaagagtcttgggacttttaatgttgttctatactctctctctttatggaaataaagagtttctgccttgagagtgctacaatggggagttttgagtgatttatgaaaagcaatgggtaagatttttttatgtgaaaatttgtattttgtttcactcccaattactgtgcaagtaccagcttttcacagtgaggtttcttacagcatgactttgttcattatgacttcagtgtttgtatacagttttgaataatttatttctgtctactactggtgagatgttactttctgctaatttaaaatgttttgcctaacgtttttaatgaaagtccttataaatatgtttgtttaaagtctgaaatctaaacatgtccttaacagtaccaacgaggcagcattaaaacaaaaggcatgttgattttaaggccaactggaagaatgtatatctacaatggtgtagacgtgaggctgtaatgagcatgagtgtagtcaagacttatggctttgttgactaaaacttaagagatgctttcctttctataggacctccatttagaggagaaaaggaaatcattaagtcaatagatgagttattaaagtataaagtaaaaatg

SEQ ID NO: 541 - DNA, 899 bp, Homo sapiens; identical to SEQ ID NO: 540

SEQ ID NO: 542 - DNA, 416 bp, Homo sapiens
tttctcctttgactttgtttttcccaataatgatttgtttttatcttctttcctagtaaccaaaaattaaaacaggacagagtttccaaaggaaatgtctgtagatgttaaccaaactgattgaatcactggttattctttgcttactttaaggctgtaaatctgcaaaaagacagaggtgatactggtatcactcacagccacaggttagtgccttggctgtgctgatgctgccagggtttaaacattgctgtgaggagcccagcacaggcaggagtgtggggtgaggatgtgtgataacagggcatgacgggcaggtagaactgctcgcttgtgttttacacacaggcgccccagccttcctataggctctttcttgtgaataggcttccaccatgaccaaaatgtttgaaaaa

SEQ ID NO: 543 - DNA, 301 bp, Homo sapiens
caagaaattactatttttttttgagacggagtctcgctctgtcgcccaggctggagtgcagtggcctgatctcggctcactgcaagctccgcctcccgggttcatgccattctcctgcctcaacctctggagtaactgggactacaggcgcccaccaccaggcccggctaattttttgtatttttagtagagacggggtttcaccgtgttagccaggatggtctcgatctcctgacctcatgatctgcccacctcggcctcccgaggtgctgggattacaggcgtgagcccctgcgcccgg

SEQ ID NO: 544 - DNA, 288 bp, Homo sapiens
tttttttttgagacggagtctcgctctgtcgcccaggctggagtgcagtggcctgatctcggctcactgcaagctccgcctcccgggttcatgccattctcctgcctcaacctctggagtaactgggactacaggcgcccaccaccaggcccggctaattttttgtatttttagtagagacggggtttcaccgtgttagccaggatggtctcgatctcctgacctcatgatctgcccacctcggcctcccgaggtgctgggattacaggcgtgagcccctgcgcccgg

SEQ ID NO: 545 - DNA, 416 bp, Homo sapiens; identical to SEQ ID NO: 542

SEQ ID NO: 546 - DNA, 785 bp, Homo sapiens
ttatcattattattattattttaaagacagggtctcccttcattgccctggctgcagagcagcattgcaatcatagctgactgtaaccttgaacttttgggctcaagcaatcctcccacctcagcctcccaggtagctagggctacagatatgagctaccatgctcagttaattttttttgtttttaatttaatagttctcagaagtttaactcaagtgttttagtgtggatttctttggattttttctctttggaattcgttcagcttctgaagtctgcagagttatgtcttttgtcaaatttgggaaattttcagccattgcttctttgatttttcagccccacactttttcccatctcccctggaacccttatgacacagatgtgagatcattgttcatagtcccacaggtccctaaagctctgtccatcttgttttcccatgcattttctattcatttttcagaatgggaaatttctgttctgtcttcaagttcactggttctttcctctgttctgtctattctgccagtgattcctttatagagtttttaaaatttcagttatggtatttttcagttctaaaatttccatttggttcttcattatgtcttctatttatttattttttttttggctgagactttctatttttagtttgtttcaaatgcgttcttaattgcttaatgaagcatataatggtggctttcaatttttttacagataattctaacatctttgtcatcagtgttgacatctcttgattgtatcctgtcattccatt

SEQ ID NO: 547 - DNA, 6146 bp, Homo sapiens
agagctgctttgatcttgtgtgtacattagatgactgccaggggcatgaaggggatgtgcttccagggcatttgctggcagggcgtctcgtgatctcttggtattggtgtgagcacagcctggcaggagagggcagatctccatgcaaagtatgtcagaaagcagatggaagccaggccccctcctgaaagaggctccttgaaggtaggtgcacactcatgtctttgttacttgtaagggggcatcttacaggcaagaggagttaggtgaatgtgaagaggaaggaactgctcactctgggcagggggctgggggaggcttcgtagaggagggggtgtttgagctgggccttgaaggtcaaaagggttttgttaggtgggaaatgggggaaggacagcctgaaagggttaggtacattcgaggagcccagagaaggttcgtggctggagcagacgcattcgtagagtgaagtcatgggagaagaggctgggaaactagattggttccaactcctaaaggaccactgaaggagtgtgggctgcacgctgggtgcagcaggtgagtttcctcacttgggtttcactgtcagcatttttaaaaggcaaactggttctcttcctgagaagaattcattgattcactcgtggccagtaagtcatctgacaaacccttgtgtacttctgatgggataggagtgtttgtagacaacaggcacacaaatataacatgcagcccagtgcagctcaggagcagccttccatggataagcggttggtacctacagtgtgctcctgtccttgctaatctgaacacataggtagtaaccttaagcatgtctcaatcttctgacttgtgatgaggtttccaattcttgttcctgactttagaatgaagtttggagagttgtcattaggtctctaggttctgaggattactgtggggtaggcagagggagagaagagtgttggggccagatgttcctgtgcttctaccagaaagttgatttgcccagtgtaccaccctcacttggcaggcctgagcagagtggcctgccactgacaacccagagaaagaaggtacagtgcaggcttgccctggtgggctcttggatgccctaagctgcagcatccagggccaggtgggatttggtaggataggccccccgtctactgtgtctgatcatactgcctttgaaagagaagggtgggtggtgaagacaagacgatgagacagggtggcctctgcatgttgtagcacccaactggaacatttgcagatgatacttggaaaaagctttaggaaagaggcccacttcatttatgaaatgacaccagctaatgtttgaccttagtcatatgttccttggttcctcattttgccatctgctggctgactcatacagcttcacttttaattaaaggtgggctgtgatgagagtcatgatcagtgagtggcttccatggcagaaagttctgtgtagttcttgggggatgtgagtgtaagtttgaggtgctaagacgaatatgtccatacattgtaaactatttcctctgtcctttccctcctctaaccattcctgccttcttcatctttctaactttcccaaggcattttacatcagatttcagatatagaacaatggatgttaaaacaaacccaaattcctaatgcttggtaccatgaaaacatggcaacactgtttgcattttctttacaaatggcctgtatgggtcagcccaggcattgacataggagcccattgtttgcatcctctgggtccttgtagttcatatgctggagcaatgcatagagacacacagaaaggctgagaatggccatgaggtatgtaacaatgaggcccagagcctgagctttggtgtctagcagacctgggtttgaatgttagctctttgtcttcctgtgtgaccttgttggttactcgtctctctgtgtctcctccactcctataaaccaggaggtacaaatgccactcatgtcacagggctgttgctgggacatacccttgcaccttgtgttgtctctttctgggactcaggttctcaagatttgcttctacatttacaggttggagattattccagcaacactgatgaaagatttttttttttttttggtctctcagctttgcaaatttcagagatttccaacagtgttcaagggactgcaatgtgatcttggaaaaatcctgtatgttctttgaataatctcagttgtgctatctagaaaatgaactggttagtctagaacatggttttcaaacctatgtggccatggaatgtcattttggagggatgctttcacaggatgtaagattctgagttgaaagttttttttttttttttgagacagagtctcactctgtggcccaggctgtagtgcaatggggcaatctctgctcactgcaacctttgcctcctgagttcaagcaattctcctgcctcagcctcccaagtagctgggattacaggtgcatgcatgccaccacgcatggctaatttttgtatttttagtagagacagggtttcaccatgttggtcagtctggtcttgaactcctcacctcaggtgatccgcctgccttggcctcccaaagtgctgggattacaggtgtgagccgctgcacccaggtgaaagctattttctgtaagcccttgaaaaaagttgtgccacttccttttggtatccatggtttggtaaggtgtcatttctctcgcattgcttccaagatttttttttttttttaatgattatcattattattattattttaaagacagggtctcccttcattgccctggctgcagagcagcattgcaatcatagctgactgtaaccttgaacttttgggctcaagcaatcctcccacctcagcctcccaggtagctagggctacagatatgagctaccatgctcagttaatttttttttgtttttatttaatagttctcagaagtttaactcaagtgttttagtgtggaatttctttggatttattctctttgggattcgttcagcttctgaagtctgcagagttatgtcttttgtcaaatttgggaaattttcagccattgcttctttgatttttcagccccacactttttcccatctcccctggaacccttatgacacagatgtgagatcattgttcatagtcccacaggtccctaaagctctgtccatcttgttttcccatgcattttctattcatttttcagaatgggaaatttctgttctgtcttcaagttcactggttctttcctctgttctgtctattctgccagtgattcctttatagagtttttaaaatttcagttatggtatttttcagttctaaaatttccatttggttcttcattatgtcttctatttatttattttttttttggctgagactttctatttttagtttgtttcaaatgcgttcttaattgcttaatgaagcatataatggtggctttcaatttttttacagataattctaacatctttgtcatcagtgttgacatctcttgattgtatcctgtcattccatttgagatcttcctggttctgggtatgatgtgtaacttttgattgaaatctagagattttcatattatgttagtaggttgaaggtgttatttaaactttgttttagctggcatcctctgacatcactccagcagaagaaagggaaggaacacgctgcattactgcgtggtgagtgcagtagtctaccttcgccacatggcctccattgatccctgaaatgggtgaggggctccttgtttctgctgggcaggagtggactttttggatctgatctggggctgtactcatacctttgtggctgggagggttcgatatttttcagcactgtatccaatatcacctgcacagacaccttaggggatggggacttgctgttgcctggcagggatgaaagtgccagctccctaattggccacctccgacagcaccaaggtagacaggagggatgttacagcttagcaagcatgttacactgagccccctagttggcctttgctggcatgtgtggaagtggggatcaaactatatttctgtggtgttaactagagtaaagcagctcactgtctaaaagttttctatcttgctaagtcacaactttcctggtcctctggctttggtccttctttcctccctcccttcccgtccccctttcctccctcttttccttcattccttctttcttctttcctctgtgtttgttgacatttctagatcccagctccttcagctccatgtctggtatatatgggcaaagaaagaaaagagagagggagaaagaggacgggagagaaagggaggaaggggaaaggagaggagagggaaagaaagagggtagagagagagggagggaggaaggggaaaggagaggagaggagagggaaagagagagaggaggagagggagagagagagagagagaggaagggaggaaggggagaggagagggaaagagaggaggagagggaaagagaggaggagagggagagagggagagagaggaagggaggaaggggaaaggagaggagagggagagagagaggaagagagggaaggggaaagagaggaaaagaaagagaaaaagagaggggaagggaggaatgggaaaggagaggagagggaaagaaagaaagagagagagacacacaccagagaactaattaactccattgttcctcaggtcacaaggtccccgtctgatctgccttcactccacctttcagagtcttatgtttgttttgtgtatattatcaaggggttttaggtcacttagtcggaagaatagggaaaagtatgtctactccagcttaatggaagtggaattctcctgagaacctttttttgatacaaaatatgtacttgtgcatattttgtatcaaaatatataatgtacatgtcccttttgtacatgtatataaattgtatataaatatttagggttataaaaataaccaaagacaccaaaaactgccacaggtggatttgagaagatgtggaaatgcctcactgctaagacatgctcattcttgacaggctgggaaccctgaatgctgtagtgtcaccactgccctgtcctgtacctacctatcttttcactcatttcctccaagctcaggttttcagtttggggtatgtgccacctaacagtgagctgtggaactgcagcacaatcatcaaattcaaaaaaggcaaggacatcttgctcagtttttaagatacgccatagatggagtaaaccataacctttgattccagatccttaaccctgattaaaaacaacacaacccttcatgttgatttaaaacatcccttgcaaaagatggtttgaatattccaagttggaaatacccagtcttttaaagttacagcaccctttttgatacaaaaaatgtgcatgacagaaattgtacagtgagtagtgttataaaaataaccaaacacaccaaaagctgccacgggtaaatttgagaaagtgttgaaatgtaccgcacagcatgagaccttgctggctccgtctaatagatgacgctggggctgcaaatgatgtcccagccttccagggcctgtggtctccagaacagggctgaaacctgttctgagttgacagtgctttcctaaggagaccccaagttgagaggaccctcttacccactcatcaataatcaaagcagacttgatgcccatcagagatgcccaatgattctggtgagccgttcctccctctggctgtcagtactggggagtatggtggggactttcagatagctcagtgaagctcagaaagagagggagttccccctgacacccgccccagtcagtaagccccggggcctgaggggcatccccactgctcgacctctccactctctcggggaggacgaggcagccttgacccacgagggctgatgaatgggtaggttatcggcaggctcctaggccaccagcttagaggtcacattgtcccttttagattcagtgtggcgggaatctaaaaggtcgaggatcgagaagcctgcaggatggcaaagtgagggaccccggcagtgcgacctcaggaatccactcccggaactctgactggggtgcctgtggaggctct

SEQ ID NO: 548 - DNA, 397 bp, Homo sapiens
tgcagtagtctaccttcgccacatggcctccattgatccctgaaatgggtgaggggctccttgtttctgctgggcaggagtggactttttggatctgatctggggctgtactcatacctttgtggctgggagggttcgatatttttcagcactgtatccaatatcacctgcacagacaccttaggggatggggacttgctgttgcctggcagggatgaaagtgccagctccctaattggccacctccgacagcaccaaggtagacaggagggatgttacagcttagcaagcatgttacactgagccccctagttggcctttgctggcatgtgtggaagtggggatcaaactatatttctgtggtgttaactagagtaaagcagctcactgtctaaaa

SEQ ID NO: 549 - DNA, 361 bp, Homo sapiens
  misc_feature (116): n equals a,t,g, or c
ttcctcattttgccatctgctggctgactcatacagcttcacttttaattaaaggtgggctgtgatgagagtcatgatcagtgagtggcttccatggcaaaaagttctgtgtagtncttgggggatgtgagtgtaagtcttaggtggtaacacgaatatgtccatacattgtaaactatttgctctgtcctttccctcctctaaccattactgccttcttcatcttgctaactttaccaaggcattttacatcagatttcagatatagaacaatggatgttaaaacaaacccaaattcctaatgcttggtaccatgaaaacatggcaacactgtttgcattttctttacaaatggcctgta

SEQ ID NO: 550 - DNA, 7694 bp, Homo sapiens
cacgcactgacgacatcacgcacgtacgcacgccctggctgctaggagacgctattctctttacctggccctgatgcgcgccagccaaccaggccaaggccaggggacctcgagaccggcagcctcgacgaagaaccggaaggaggaaaaggaacgggagggaggaagagtaagtggaagggtgggacgaggacaccaggcaggagttttgggcccagagctgctataccagcagggaggagctgggagaaaccgctggggagggggtggaggcggggctgagaggaggagggcggagctgggggaggggccgagcgggactgacagaaacaattgggggctgggttgagggcggggctgagataagaggcggggtgtggggcagggccgggcggggctgagagaaaccattgtgggcagggccgtgggagagctgagcgaggagaagctgcaggaagagctcgcggactcttgagaatcagcagggggaggcaggtgtccgctgagagaaggagggagggggagaaagaaatcactgggaggggctgggggcggggtttttaaagcagctgcgtgagaagtagggcggggctgggagaggcggggctctgggggggctgagaatgctggggaaggtttgggggcggggctttggaggcagccacaggagaagcaggtcggggctgcgggcggggctcggggtggggcggggctgagagaaactcctggggagggggccgagggcggggctttgggagcagccgcgggagaagcggggcggggcagggaggggaggggcggggcagggaggggcggggctgagagaaactgctggctgaggtcggggctttggaagcagccccgcgaagagcagggcggggcaatgggagaactgagcgaggagcagctgcgggaggacccctcggactcctgagaaccagcttaggggagcgggggcttggggaggtgtagggtggaatcacgagaaagctctgtgggagggcctggtgcacagctcagctgcagcgtggagctgagggaaagccgggcgttcctggaggaggagcagggcggggctgtggcaaagaggtgtgggagcagatggggcggggctgcgggaaattgctggagaagggggagccaagctggagtaaggctggcgggtgagaatggtgggggaggagctagtgcagagctggaggaaagagctgaaaggtgctggggtgggcagaggggtaggagaagcgggacggggctagaggaggcggagctgggactggagatgcagggtgagcagggtggggctgtgggaaacgaagctgggggtggagctgcagcaggaactgggttagagcttctggaggagccgcctgcaagaggagggcgtagttgtgggaaagagctgtgggtggaactggttaagtgctgggaggaggaagagctgggggcggaacagctggggcggagctgccggaggaggagctgggggtggagatgctggtgaaatgaagcagagccgaactgggggtggagctgtgggtggagctgggggagggagctgaggcccttctgtgatgcacccttaggcaagagtcaaaacttgcccgcagcgacctaactgcacctccagtgtctacccccatagggcacggaagcagcaagaagggcgggaacacttgactggggtctatgcagctctaggctgagtcttgcagggctgagccccccaggcctgctctcctgtgtcctagccgctctgtcagtgcctgccagtggggtccggaggaaccgtctctttaacgtctcttttgcaggtgatgagaaacatccccactcttaatgtcttgcctcctccgacctaagtcgcccagcacacagcccaacttccctggcaaacttgcttttcaaactctcttctctcagtcacgggctcaggttctgtagtgctgccatgctttactcctctgtccctccccttatctagtctcccgcattgacttcataaccaagttctgggtccctgcctctggagtgcctgatgagacaaaacggctcctcgtcctgcatccccgctgctacttccagaattcaggcctcgtggtctggagcctgcactgttccatgagcctcctgagcaacctggagtcctctgtctttcttccctcaggtctgtcgtccacattccatcggctcagtttctaagtcacaaatctgtccccagcaatcctctagtgaaaacgctgctgggccttctcaggtttaagtcctagcagttcagggagtcggctcagctctccccacccttaagccaaacactctttgggttcacgctgtgctgttcagtcactggtccccaccagcctgctgttccaggtctccctgctttgcaccggcggttcccatggccttgtcctggtgcgctcctggcctccttcaaggcacaactttaaagtcaccttcacagccccactccgagtattagagactttcgtctccagctctgatagcattttgtacctcccccgtccccaccccacgttaggctcttgcaacccagggtggtaattgctctgtaagactgtggctgccgcagggtctcttgagttccttgaaggcaaggccggtgttttactcatttctgaaactgggtgcccagggcacagtatctgcttagtaagtgttgaatgagcaaagggctgctttcttgttttttctagtgagatgcgcctacttctccctggagaagctcgaggaagcaggaatgctggagatgaggtgaggaggagagggtccctctttatgggatgtaggccgtagggctgcaggggaccttcagatcaccagttccaattcctatgcatgctagcatcccctcctgggttccttccccacaagaatggttgccagcttctgccgaacaccccagaacctgcttagagtggtttcaaatcatgaatgaggatccccgggatggtgggtggccgttgctcctcccgtggcctcttgtttgaagaactagaactcgcataatgagctggatagccaccgtgtggctgctagcagggaagcccttggtggccacataagggctcccttttccaactctctcagctgctcctcactctcactcctgggtgtgctgggcagtggggtgcaatgtgcacgtaggtgcacactctccctgggcggcagcgagaagcagaggtctgatctgtggtcggatgaggagaggaagtgcaagtaaagcagctgcagcggtgagtgggcctaggaagaatggcatcaacaggccaggcagggatgcgggtggtgttcggctaaccctgagaaagggaccagaatgcacctgagtcttgattttcattcccaatagcaggtcagcacgaaacccaaaaacgctctgatttctgccttccatgctacactctcttcacctgctgccttctcactcctctcattaacaatgtcctggcaggaacaagactttcccctccctctcttctcgtctcttagcaggtcaggtcggccttcacctccctagacccgtcctgctcctgccttcccctgtggggccctccatggatgctctggagtcccgggcaatagtcagccaactgcagacatgcggggccttcttgggttccttgctgtgctcccttgaaaccactgtgcctggctgcaccccagtagcacacactgaactgacccccactcctggggccagcggtgtgtctcctcaagttctgcttgcttcttcaggccttgcttgcatgcctatcgtgccacacatcatatctcttttaggaagtccttgccttttccaaagatcctgctttgcagctgactgtaccctctgcctgcctcccccaggatactgcctccttcctgaaaccacagcccccgctcaggtcttccttccttcctcatcaccagggagccccctgcagagctcccagtccatcccggtggccttctgagcctcacctccccttccttcccctcccatcccttcccctcccctccccttccctctccccgcttcccttccctaccctaccctgcccccccaccccctgcccccaaccctgccctctcctgctctgtcctctccctccatggcaggctagcctccctggctagagctgtcccttgcgaatttgccatcaccttgcctctccgtgctcagcatccccggctgtgcagtccttctcttctgcccacatgctcccctagagaagcattctttttgctcagcctaatttccgtgcaactcctcctgttttctgagcctgtcaccgccttcctcttcctttgcctccccactgacactttccagagtgcagccacctctcctcactgtgcttttttgactctgaggcccaggaggaagttgcccttctctggagatggttcacgtttgatcctgcctagtgttccggggcacggccagtctgggaccgctttgaccctgattcatggtttcccttcagatgctttttggtcagcctgctttcctcgtctaggaaatggcttttgctcatttttctattgagtcacttgccttgttgatatggagttgtaggagctctttctgaattctgcctctaaccccatgttggctttttgtatttcagagacctcgtctgctcaggggcttgttcttacatcttttgcagggctgttttgaagtcagtattcacttaagcactccaaattgtaagtaaccccagaggtcatggagtgtcccactgcccctccatctggaggcagtgacccctctcccacagaggaggtgctcgcatgtgtccagtgccctgcccattagattagagagggttcccttttttgctctcttgcattcatttgtccgccttttagctttacttttctgccctggactcacacagggtcatgtgaacgtgtggtgtagcaggaggagagaggtaaagtggaggaataggagctggaagggaggaggagggaagaaaaaaggagggggagggggaggagagggagtgggttggaggagggaaggaggaggagaaggagaggaggaggagatgagaccaaggacaagaggtgaaggaagagaggaggacacagaaaagagaagaaagaggagaggaggagacggagaagaggaggaggagcagcaaagaaggaagaagaggaagaggactagaagagcaagtaaggaggaggaggggggagtaggaggagaggagaaggacagaaggagaaggagaggcagatgaggagaggaggtcgaggagaggaggaaatgagaaagaggaggagaaaaggagaggagagggattaggggggaggaggaagagaaaacaggagatggagaagaggaggagtgagagaaaagaggaggagaggaggggggaggacggggaggaagggagaaggagagaaataggagggaggaaaggagaggtgtaggaggaggaggacaggacgagaggaggagcagaggaggaggagaaggagaggaaggggaggagatttggaggaagaggagaggtggaggaagaaaggagaaggcggagaagaggagaaagcagagaggaggaggctgaagaaaggaggaccatttaggagaggaggaggaggaaaggaggaagaggaagagtggaataagaggagcagaggaaaaggaggagggggtggaggaggagtgaagaggagaggaggaggaacagagttggaggaggtggaagagagaagagaaggaggagaggaagagagaaggaaatgagaaggagaaaagtaggaagaagagagaagaggagagagagaggagaggatgaggaggaggagaggagaaggagagcaggaggtgggaggaggaggagagtaagaggaggaaatgaggaggaagaagaaagaaggacagcagatggagaggaggaagagagaattaggagaggaggaagaggggaggagaggaggagaaggaaacgaggaggaggacgaagctgcatcacccttatcaggttccagttctcggtgcgccccgttctgcaagacactctcctgtggtcagccctggcctgcagaggattcccgcgctggatctctgaaggatgctggcgccctctctgcagcacattcctgatgcccttgctgacacatgtgtcctctgggtcctctcctgaaacctgatcctccggggtgtcttctggcctcacctcttctgtccagttccagcaagctcactttgcttagcctttgaatcccttccttcactgtctgctgtgacaattcgggcctttcactgtcactcaggcctggaccatcactgttgcccatcccatgccatcaacaggtttgccccatcccttcggctccctaccagggcattcagttgtgttgagcagcagagtgcctccaagtccccactggttgagctgcatccgggtcccatcccacagggaccccccctggccgctgcaggtgcatgctgatcctgcagctcctcgagggtgtcatcgctttcccccttcccagacccagcacaccctgcctgcatggcgctgcgctgcaccttcactctggtcacgggtctggcagtcggctcaccaattcgtcctgcttccctgggactcgccggcttttagcactgcaattcactcagcaaactgggactgttggtcaccctacctggcagccagtgataaggtgagggccactcctgggagggaggacacctgtggggaaaattcttgtgttatttatttctccttcgggatagggtgcctgcagcgcttcatgggagggggtgggctgatgctgcgggctcagaagtttcaagggcatctggggagaccagatattcagagaccttctcctagatgtgcctgttccatgtatcagggacacaggttttcccaacagggctggtgtcattggcatgacagacctgccttggctgagcgttcacccgtcttcggagttcagccaccttagcaagtcctgggtttgtccttcagattttgctgctcgcccattgcctggatcgggggctactttgtaaaccaccaggaagactccagtgtttctgcttaatttttagatgtttgttaattgctcttggcctctcattaatcccctgtgggtcatccaggaaatatactcaccactgtctgttctctgagttttcatttccaggcatccgccctgcctggatctcctcacctgccaggaacttcctctccacaagccggccatcccagcaaaagttctaacaccaaaggtctggcaactagcctgccatcttgtgcctggagccgcctgcgtgccacctactcccgaagatgggaaccttgttgccagttgggcagatgcggggcaatcctgtaccaagaccccattttaccacctgctttctcagaccactctggaacccactgtctcagattgtgtcctccaggaagcagaccatgagagggagttggcagggccaaagatttactggggctaactaacactcaggaaagggataggaaggaaacagggctggagagcaggttgagcccgacctgacagtctcgagcagcccaacagggaggtgtggagcaagggttgcccactagaggggcctgcattgggtacgggtgatggggtccacatggtacctggcatatagcaggctgtgcaatccatattaactgactggataaattaat

SEQ ID NO: 551 - DNA, 671 bp, Homo sapiens
ggaaaaatggcagagttaagatgatacccccaggatgatgaatacaattgacttcttattggatttggaacgtaattagaaagaaatatgcacaaaggacagtaacgtatccacatatagatgtacccactcagcctcacttcatagccagtcctgatccttttcaaattcagttgaactactttgggccacagtctcccagattaccaggtacttgctaaaaatatttagagtaactaaaagcagatcatcccaagaaacttacttcaagttaattgaaaatccaatattcctgaatcatttgttaatagttctcaaagaataatggtaataagacaattcccacatacctctactctttggttttataaagtataaacctgggcactaaaataatttaactacctgatatggacaagaactcaataaccagcataatcaggaatgagactttatttattcagtaagacttgcaaccatatcccatacaaaagtcttttcctttcatccatgtctgtattcaaatgaatagcaataaattaagttcacccaaaacccattggactttatttaaatcaattataaaatttcatttgaaacaagaaaatttccctccttttctactgaatctgtagcttaggacgctttcagctgaaactgacagaaatatc

SEQ ID NO: 552 - DNA, 303 bp, Homo sapiens
tcctcacataataacaccctttcttctacctcttcttaaggctcggaaagccttctcagaatctctccctccagcaaatctcctctcatatctcattgtccagaactgcgatatgcatgctcctaaaccaaccactagcaagaggaaagaaatcaaaataagcttaagctaatcaagattggtcaacttttcctgaagcatatgattacacagtacctatacaaatgtgggattctgtcaacaagcaaccaactgtatctgccacatcttccccaagtgttgcagtcaccctgtactgaggag

SEQ ID NO: 553 - DNA, 642 bp, Homo sapiens
gccacaacgcccagcctgcttgaacttttaaaaagatttgtcagtcatatgttaaacattttagaggactcttctgttttcttcctgcaatatctccaattcatactacctccccaatgtctacctttaaggagaaaccatcccatattgtaagcttgaaagggtcatttataataaacgtaaccagttttgttcacagatacataatgtgcctctttaagatgactagagatcagatttgccaaattttcctctctgatttctatcaaggtcatcctaggtatgtctcatctgtttaatcttcctttctacgtagcctaatccatagtatatttttttttgtggtccaccacttagttctttttctttatttggactcagatggggtgaaagtattactttcaacttgagtcgctacatttccccaagaagaatttggggagggtgaaggtgaccctgaaaagggccctgtagtgtctcccaagttttcgtctttgcttgggtccctcctggtctctctgtcatctttgttcagagtctcaatcactcatggtcttaaatttcatgtcagatctttagtaggaataaaatgtctgcttagatgcctgtggaaccgtggatgaaactggccgagtcaaaggg

SEQ ID NO: 554 - DNA, 642 bp, Homo sapiens
gccacaacgcccagcctgcttgaacttttaaaaagatttgtcagtcatatgttaaacattttagaggactcttctgttttcttcctgctttatctccaattcatactacctccccaatgtctacctttaaggagaaaccatcccatattgtaagcttgaaagggtcatttataataaacgtaaccagttttgttcacagatacataatgtgcctctttaagatgactagagatcagatttgccaaattttcctctctgatttctatcaaggtcatcctaggtatgtctcatctgtttaatcttcctttctacgtagcctaatccatagtatatttttttttgtggtccaccacttagttctttttctttatttggactcagatggggtgaaagtattactttcaacttgagtcgctacatttccccaagaagaatttggggagggtgaaggtgaccctgaaaagggccctgtagtgtctcccaagttttcgtctttgcttgggtccctcctggtctctctgtcatctttgttcagagtctcaatcactcatggtcttaaatttcatgtcagatctttagtaggaataaaatgtctgcttagatgcctgtggaaccgtggatgaaactggccgagtcaaaggg

SEQ ID NO: 555 - DNA, 642 bp, Homo sapiens; identical to SEQ ID NO: 554

SEQ ID NO: 556 - DNA, 281 bp, Homo sapiens
cttttcacaggtcagggtgaaccacagcctgttcccagattatccccaaagatcaaactgaccttgaccaacaagttctagttcttctacatgtacttgggaaactgtcactttccagagagagttcagcactatagtgacgctttattggaaaagttgacaatctgccttgtttactaacccttctgtaaacacttatttggtaaaccatcaccagaccatgtgccttggaatgcgtgcgcatgcaggggacatttttaatgaggtacagtgccattgag

SEQ ID NO: 557 - DNA, 266 bp, Homo sapiens
tcacacctgtaatcccagcactttgggaggccaaggcaggtagatcacctgaggtcaggagttagagaccagcctggccaacatggtgaaaccccgtctctactaaaaatacaaaaattagctgggtgtggtggcacatgcctgtaatcccagctactcaggaggctgaggcaggagaattgcttgaacccgggaggcagaggttgcagcgagctgagattgcaccactgcactccagcctgggtgacagagcgagactccgtctc

SEQ ID NO: 558 - DNA, 281 bp, Homo sapiens; identical to SEQ ID NO: 556

SEQ ID NO: 559 - DNA, 266 bp, Homo sapiens
tcacacctgtaatcccagcactttgggaggccaaggcaggtagatcacctgaggtcaggagttagagaccagcctggccaacatggtgaaaccccgtctctactaaaaatacaaaaattagctgggtgtggtggcacacgtctgtagtcccagctactcaggaggctgaggcaggagaattgcttgaacccgggaggcagaggttgcagcgagctgagattgcaccactgcactccagcctgggtgacagagcgagactccgtctc

SEQ ID NO: 560 - DNA, 281 bp, Homo sapiens; identical to SEQ ID NO: 556

SEQ ID NO: 561 - DNA, 11150 bp, Homo sapiens
caggctgtgaacaaccggtccatccaactccccaccaccgtgcgggacatcatgaaccgctggaccctgcagatgggcttcccggtcatcacggtggataccagcacggggaccctttcccaggagcacttcctccttgaccccgattccaatgttacccgcccctcagaattcaagtgagcagatggggtcactgaggcatggtcaggtgggtggggtagagggcagttactaagggaccatagtaggactggcctcctgtggtcccagccccagccactgtagacagaccctccctccagagccaggagttcaggggcactcggtgccagagctgggcagaagctgggagcctgggcagctgctcctcactggcagtgaccacaccgccatctctcaccacctctggatctttaattgcagctacgtgtggattgtgcccatcacatccatcagagatggcagacagcagcaggactactggctgatagatgtaagaggtaatccagccctgccttatgggcagcagcccccaccccatactcctagctcctggcccatgttctgagggctgtgatgggccattccattcaacaaatggacttgacttctttggttccaatctccactttgctgctgcttcgctgtgtgactctgggcaagttaccatcccgctctggtctctagttcctcttctataaaatgaggctaagagcaatactccattagttatgtgaggattaaaggagagaatcctaggccaggcatggtggctcatgcctgtaatcccagcactttgggaggccgaggcgacctggggtcaggagttcgagaccagcctgacaaacatggagaaaccccatttctactaaaaatacaaaattagccaggtgtggtggtgcatgcctgtaatcccagctactctggaggctggggcaggagaattgcttgaacctgggaggcagaggttgcagtgagccaagatcgcaccattgcactccagcctgggcaacaagagcgaaactctgtctcaaaaaaaaaaaaaaaaaaaaaaggagagaatccacataaaatgcttaaagtagtgcctggcacatgttatgagcagccctactcagcaaggcactgaagaagcgaagggcatgacaagtcatcctttgccttggccaaggctacagatgaaggaaggcaagaagttggaggcattctagtgctgtgctgagtgctttcagagtgtatggttggggctagtgaggtatggggacatggagcagggaataagggagattcaagttcatggagaggtcagggagggcttcccggaggaggtgagctgagtcttagaggaagagtaggaatcagacaggctaatgtggcagagaaaagaattccaggcaaagggaatagcaagtgccagggatagaggtaggagagagtgtggggactgagtgtagctagggcagaggtgtgcccaagagataaagctggtccccaagggccccaggggctgcaggagacagtggatggggcaggtgggaaatgagcaacctattggccctgacctctggctgctgaaacaaagtatgagaggagtgagggaggagggggacccacagggaggaaggggcactaagccccagaaagagacagcagcactgggggtctgggtgaatgggaggggaagggagaggaggagctgcctgtggttcccacttgggtgacaggtgtgatggagtgtggaggagggcaaggaggaggaacagcctggattgctgagtgtgagcggcctggcagctggcctggccgtgcagagcctagggaggcagggcaggttctgaggtttggggtggcatgtcatcttcatgggttgatggtctgtgaagccactggcagcccagttcctcatcccttccttccccacccttagcgtctccccagcagcttgagggtgaggtggtgccaggctgcgggggcagctgctcttgcaagaggtccaggggtcagcccatggcctctgagcagccctgcccaggtctcgtccctctccacagcccagaacgatctcttcagcacatcaggcaatgagtgggtcctgctgaacctcaatgtgacgggctattaccgggtgaactacgacgaagagaactggaggaagattcagactcagctgcagagagaccactcggtgagtgtctgccacccctcgccctgccccctgccccaggacaggcaccagactgcaaggcctgccacccacagccaacccatggtcacatgctgtgcttcgcattctaggccatccctgtcatcaatcgggcacagatcattaatgacgccttcaacctggccaggtgagtgctccgctgcctggctcagctgcagaagctcgtgacttcagcaagtctgagtccacaatgagggcccctgctcctcctgctgcccttcccatatgccacgtgctgtgccctgagctcctgtgctccctggacgtccctccctgggtccccacacacccatttcacagatgaagaatgtgacaccttgcccgaagtcacacagtagttcatgacagccagacagaggcttgtccaactccaaagccatcctctactccacagcaccaagctttttgtttttgtttttgtttgtttgtttgtttgtttgtttgttttgagacggagtctcgctctgttgcccaggttggagtacagtggcgcgatctcagctcactgcagcctccacctcccaggttcaagcgattctctgcctcagcctcccgagttgctgggattacaggtgtgcaccaccatgcccagctaatttttgtatttttagtagagatggggtttcaccatgttggtcaggctggtctcgcactcctgaccttgtgatccacccacctcggcttcccaaagtgctgggattacaggcatgagccatggcacctggccatgcccccccgctttttttttttgagatggagtcttgctctgtcacccgggctggagtgcagtggcgtgatcttggctcactacgacctctgcctcctagattcaagcgattctcccttctcggcctcctgagtagctaggattacaggcatgtgccaccatgcccagctgatttttgcatttttagtacagatggggtttcaccatgttgaccaggctggtctcaaactcctgacctcaggtgatccacctgccttgccatcccaaagagctgggattataggtgtgagccaccgtgcccagctgcaccaagcttttcctgaaggctgactatgctgggccactgttctaagtgccaaaaatctgggctggacagggcaggagggatgcagtatggataaacaggtacttattgagcacctactctgtttggggtgaggtactctaagctcttggacatgagtgatgtcacccacagacaaggacatttgtgagctaaatgtgtacagaaggcaggaggaagaaaggcctagagtgcccagaaagtcagaagaggtggtcagagttaagaacacgggcttcttgcccttttaaatctcagctctgtctctcgtgaggtgtgtgaccttgggcaagtcacttcacttctctgagcctcagtttcctcatctgtaaaatggggataataagcaaaggagtggaactgccaatgggtgagggtggggccttgtttgtggcaccacccagcagccatgtagctctttttccatggcaaatgcctgagctggctcagttgggaatctgggacctccggctccaggagtggatacagggggcctaggggtgtggagcatctttgagggcctgggttggggttcccaggctgtggctgggctgggtggaggtgctttacttgggcccctctgtttattcccagtgcccataaggtccctgtcactctggcgctgaacaacaccctcttcctgattgaagagagacagtacatgccctgggaggccgccctgagcagcctgagctacttcaagctcatgtttgaccgctccgaggtctatggccccatgaaggtacggaggtgcatggtagggttcaagaaccagttcgccccagtgcctgaaagtgcactattaggaagttaatagactattgcctactggactcctggtcagggaaccttcaaaagcaaaacaaaaaaccaaaaaaaaagaaagattgccttgtcaggttctctcctgagagcacgcaggtgaaagagcgagccggagggacatggaggtgagtgagcaggcactgaggaggtgagtgaggaggctgcgtggggcaaaacaataaaggtcgcggagacttcagcaacgtttgttgatttgaaatatggggaattaacgctttcagaaggcacagaaaaggccaccatgctgagggccagaagacctgtcttttgccagctgtgtggccttgggcaaccctttctcagacccagttaacttctctgtcagatgggcaggcctctacctgcccggccagcccacctgcgctatgagagagatgtgggtattggctgctttggagtatcttaaggctgagcataggggcctatttgagggctgaggctcccgcttgggagaccaaaaggaaactcgagcttattctggatgaataagctacatccataggatgctcactgcagcagtttataaaagacaaaaagcaaacaaaacacaaatacttaaacgtctaaaggttgaagattggttaaactgtagaatatccatttcagggtgtgatatgtagtcattaaatcatgcttgaagagatcttttttcattaaaaaatgttcaattatcaggccgggtgcagtggggctcatgcctgtaatcccagcactttgggaggccgaggcaggcggatcacgaggtcagcagatcgagaccatcctggctaacacggtgaaacctcgtctctactaaaaaaaaaaaaatacaaaaaattagccaggcgtggtggcgggcacctgtagtcccagctactcgggaggctgaggcaggagaatggcatgaacctgggaggtggagcttgcagtgagccaagatggtgctactgcactccagcctgggcaacagagcaagactccatctcaaaaaaaaagaaaaaaaaaaagttcaattatctgttaatatccattatggtaaatgagagattttggtaaatgaagtttcaaccctcttactgctttccccacattccccatcctcctaatgtagttaaatcataatatttagtcaaatcagtgttaagcatttgctttattgtgattatctaaatagtattctctgctgagccatgtagagcactatgtttatgtttccttttttgtacacagttacaaatgtatcacacaataggtcaagtttttgtttgtttgtttagagacaaggtctcactctcttgcccaagctggagtgcagtggtgcaatcaagcttcactgcagcctcaaatacctaggctcaagggatcctcctgcctcagtctctccattagctgggacctcagatgtgcaccaccatgctcttttgtagagatgcatcttttgtagagatgggatctttctgtattggccaggatggtctggaacacctggcttcaagcaatcctccctccttggcctcccaaagtgttatgattataggcgtgagccactgtgcccagcccagttttgagactggactcctcctggagtcctattctgcctgctctcttccagagctgccacacagctcccatgcttggaggtgcctccctctactgtgtttcctgcatcccatggattctttgattttttcccctctcataggggaatacatcttccaggagtttttgagaaagggttcatgagaggtgacttttctggggtagatcatctgaaatgtctttattccactctcacactggattgagcgttcagctgagtttagaagtttcaaggtgggaaattatttctctgaatgtttaaggtcttgctccactgatgtcaggcttgccatgttgctgatgcgatgcccagagccattcttatttccagttatttgaatgtgaccagttttcctcccttctggaaactttgggagcttctctcggtcctggtgggccttggtttgggcctcgtctccatctaccttttccaatcaggactggcattcacatcatctagtattggaagattttgtattgcttctttaaactttattcccttcactttttccagttatctctttctggaacccctgtaatccagcttatttctcttgctttcatcctctagttttctttttctcttctgttttccagcttgttgactttttattctgccccctgggaggttccctcagctttgcacaccacctcacctagaaattgttttcatttcttctgtcgtatttttaaatttccaagtgttctttctgattccagcatcctatgcaatatcttctcttcactctcagaggatatttattacaggctcttatgaagttttcctttttttttttttttccattgactcgtttcctcttgagttttgtgtttgttttggcctcttttcaagttggaggctgagccacccctttgggtttgagacagacacaaacaaaatgcaagtggaagctccatgggaaggtggagtgtgttgtccgggggatctcattgcgaggtgactgggtggccaagtaactcttcactggggaccctcaaaaattagtccatgggtttgttctctcgagacaaggcagtttttccagagagtaagcctctgtattgtgcaatgaggctggtagtactcccattctaggacacaggagggaagggaactggggtgccacctttcagtatggaaactttcacctctgaccctctttgcaatccagcaaccctcccactgtggtctggtgaccccactttctgagccccctggttcaatctctctcatggggtggtgaggggtgctgccctctacaaggagggaagtggggacttgggggttgaatgactccttctgtagactttgacttcatcttcctgtttgcagtccttacctcccctctgtcccttgctgacttgtccctttaatttttttatttatttttatttatttatttatttttgagacagaatcccactctgtcacccaggctggagcgcagtggcccgatcttggctcacttcaacctccacctcccagattcaagcgattctcctgcctcagcctcctgagtagctgggattacaggcgcctgccaccatgcctggctaatttttgtatttttagtagcttcggggtttcaccacgttggccaggctggtctcaaactcctgacctcaggtgatccgcccgcctcagcctcccaaagtgctgggattacaggcatgtgcccccatacctggccttgtccctttaattctgagtcttgtcacagcaagttcccttgcttctgtctccccttctgcagattctcaattgcaaattctcccactctgccaagcctggtacatctccctttctgcgcgtcccagctgcctaaactatattgaccttgcatccgctgttgcctctcctgttctttgttattgggggtttattccttttacatttggacgtggatccaggtgggcacagaaatcaacctgccatgtcaaaccagagtccacaaaggattttactagcatggggtggggcttacactacaatgttaggagaaaaatgccatgtgaagaatatgctaagtaaaaaagaaaaaactatagaaaaaagaaggtgtaaatgcatcaatgtggaaactgtagttttggtgagctcctgggtgtgttttattttctgcatatacttctctgtgtttcccaaattccctacaataagtcatggaatttttttttttttttttttttgagatggagtctcgctctgttacccaggctggagtgcagtggcgtgatcacagctcactgtaacctctgcctcccgggtttaagcgattctcctgcctcagcctcccaagtagctgggaatacaggtgtgcaccaccacactcggctaatttttttgtggttttagtagagacgtggtttcaccatgttgcccaggctgatctcgaactcctggactcaggggatccacccgcctcagcctctcaaaatgctggaattacaagtgtgagccactgcgcccagcaactcatggaatatttatgattgtgtagggaaaacccaacattttatattaagaaatggtgacccgtagacaaagaatattgcaactgactaaggctttaagcagaaagaaactcagctcagttatttgaactctagacttctatgggcccctttgagcactgtttggcctcaggtgaggccctgacctctgacgtctctgccagcgcctgccccccaacatcagaggctctgtggggctccaggcaggtcaggcatgagtctttgatgagattcatattttcttttccccagaactacctgaagaagcaggtcacacccctcttcattcacttcagaaataataccaacaactggagggagatcccagaaaacctgatggaccagtgagtgggagctctcatgggtttggaagtcctgggcaccccggggagtcaagagcaacatcctggcagtgttctctgccgcagctctcaatgcgggggcaccaggcagggagagacccccacccaggagcagggaggtcctgccctgaggctccatgtggcctgagggcccatcggacctctttatacaaagacccaaactgaaactctagctcaccccactggcttgaggttatacagtttctaggtgttgaaactggggctggagcctgttcctgcccttctgggtcacagggctgctttggggaccaaggaacctcaggcccaaggcacaaagcacatacagcgggggtcagagggccagttaggccacagagccttaggcagggtgccggcctggggttgtgtgtcaagaggtgaatcttggctggagttcgccaggtgtgctaaccgcgtgtcacccctggggcaggtacagcgaggttaatgccatcagcaccgcctgctccaacggagttccagagtgtgaggagatggtctctggccttttcaagcagtggatggagaaccccaataataacccgtgagtgtctcccctgcgcctcctctgccagtcttcatctgcccccaacagccccgtcctcagcagaaccctgtcccaccctccccgctgctgttccacacctgacctccctaccccacaccaggatccaccccaacctgcggtccaccgtctactgcaacgctatcgcccagggcggggaggaggagtgggacttcgcctgggagcagttccgaaatgccacactggtcaatgaggctgacaagctccgggcagccctggcctgcagcaaagagttgtggatcctgaacaggtgagtcttggcgcagggtgggactgcgagagccctctccccacctggagaaccaggcaggcctccacactcctcgccagatccttcacgtgacccccacagacctgttgaggtggaggcagtatttccaaagtaaccggtgcagactggaagctttaataagtgatagagacaagatatggactcaggtctgggtccatgtcctctgttcctagctgctgtggcctcttagcctttacctgacaacaactcgtcttcccttctgtcaaaggctctggtgtagctggacctgggtcttttcaaacatccagctgggcaccccctcaagcccttggatgagggtccccacctcccaccatgtgcctcatatgccattacctggatgcagtaaagaagagccacccttgggcagggtgtggtggctcatacctgtaatcccagcactttggaagactgaggtggatggatcacctgaggtcaggagttcgagaccagcctggccaacatggagaaaccccgtctctactaaaaatactaaaaatacaaaaaaaaaaaaaaaataggcatggtggcacatgcctgtaatcccagctacccgggaggctgaggcaggagaatcacttgaacctggcaggcgaaggttacagtaagcccaaatcgctccactgcactccagcctgggcgacagagtgagactccgtctcgaaagaaaagaaaagagaaaagaaaagaaaagaaaagaagggccaccctcagtgtcaaagacgggagtgaccacccacctggtgccagggcttggggcgctaggactccttccttcattgattcattgtcaaatatttctatgtcaggcatgacactagcttagccagtgaccctgtgaccctgcttaggtgactcagttttccatctatagagggaagaaggaccaaggggtccctcagcccctggcaggccgaggggatgttgagaggatgcaggcataggtgatgtgcgtgggacagtccaagttctctcctgagtcacctgaattagcagtagctgagacagcatctggccctcttaggtacctgagctacaccctgaacccggacttaatccggaagcaggacgccacctctaccatcatcagcattaccaacaacgtcattgggcaaggtctggtctgggactttgtccagagcaactggaagaagctttttaacgagtgagtctgtggaatgggtgtcagggacagcgagcgccgaggctggggcccggggggtggcctgtgcgggtaagacacgccgggggcactaaccagaagtggacaaaaatcagccaagcctgggggctagggtggggcaggaatggaaagacaagctggggtatgggccgtcccttttcccatttggaaggaaaacgtggcgtgtgggcgtattctccagaagagaggggagtgaggaactcggcagtcagacctgtgttcaagctgtgactcccccacatcctagtggggtctcccagggcgtgtcatttcatctcctctataatcatggctccctacccagtaggtgtgaggatgagcctccttagttcccggcctccctcacagttcacctctctccctccctgcagttatggtggtggctcgttctccttctccaacctcatccaggcagtgacacgacgattctccaccgagtatgagctgcagcag

SEQ ID NO: 562 - DNA, 32173 bp, Homo sapiens
tttttccagagagtaagcctctgtattgtgcaatgaggctggtagtactcccattctaggacacaggagggaagggaactggggtgccacctttcagtatggaaactttcacctctgaccctctttgcaatccagcaaccctcccactgtggtctggtgaccccactttctgagccccctggttcaatctctctcatggggtggtgaggggtgctgccctctacaaggagggaagtggggacttgggggttgaatgactccttctgtagactttgacttcatcttcctgtttgcagtccttacctcccctctgtcccttgctgacttgtccctttaatttttttatttatttttatttatttatttatttttgagacagaatcccactctgtcacccaggctggagcgcagtggcccgatcttggctcacttcaacctccacctcccagattcaagcgattctcctgcctcagcctcctgagtagctgggattacaggcgcctgccaccatgcctggctaatttttgtatttttagtagcttcggggtttcaccacgttggccaggctggtctcaaactcctgacctcaggtgatccgcccgcctcagcctcccaaagtgctgggattacaggcatgtgcccccatacctggccttgtccctttaattctgagtcttgtcacagcaagttcccttgcttctgtctccccttctgcagattctcaattgcaaattctcccactctgccaagcctggtacatctccctttctgcgcgtcccagctgcctaaactatattgaccttgcatccgctgttgcctctcctgttctttgttattgggggtttattccttttacatttggacgtggatccaggtgggcacagaaatcaacctgccatgtcaaaccagagtccacaaaggattttactagcatggggtggggcttacactacaatgttaggagaaaaatgccatgtgaagaatatgctaagtaaaaaagaaaaaactatagaaaaaagaaggtgtaaatgcatcaatgtggaaactgtagttttggtgagctcctgggtgtgttttattttctgcatatacttctctgtgtttcccaaattccctacaataagtcatggaatttttttttttttttttttttgagatggagtctcgctctgttacccaggctggagtgcagtggcgtgatcacagctcactgtaacctctgcctcccgggtttaagcgattctcctgcctcagcctcccaagtagctgggaatacaggtgtgcaccaccacactcggctaatttttttgtggttttagtagagacgtggtttcaccatgttgcccaggctgatctcgaactcctggactcaggggatccacccgcctcagcctctcaaaatgctggaattacaagtgtgagccactgcgcccagcaactcatggaatatttatgattgtgtagggaaaacccaacattttatattaagaaatggtgacccgtagacaaagaatattgcaactgactaaggctttaagcagaaagaaactcagctcagttatttgaactctagacttctatgggcccctttgagcactgtttggcctcaggtgaggccctgacctctgacgtctctgccagcgcctgccccccaacatcagaggctctgtggggctccaggcaggtcaggcatgagtctttgatgagattcatattttcttttccccagaactacctgaagaagcaggtcacacccctcttcattcacttcagaaataataccaacaactggagggagatcccagaaaacctgatggaccagtgagtgggagctctcatgggtttggaagtcctgggcaccccggggagtcaagagcaacatcctggcagtgttctctgccgcagctctcaatgcgggggcaccaggcagggagagacccccacccaggagcagggaggtcctgccctgaggctccatgtggcctgagggcccatcggacctctttatacaaagacccaaactgaaactctagctcaccccactggcttgaggttatacagtttctaggtgttgaaactggggctggagcctgttcctgcccttctgggtcacagggctgctttggggaccaaggaacctcaggcccaaggcacaaagcacatacagcgggggtcagagggccagttaggccacagagccttaggcagggtgccggcctggggttgtgtgtcaagaggtgaatcttggctggagttcgccaggtgtgctaaccgcgtgtcacccctggggcaggtacagcgaggttaatgccatcagcaccgcctgctccaacggagttccagagtgtgaggagatggtctctggccttttcaagcagtggatggagaaccccaataataacccgtgagtgtctcccctgcgcctcctctgccagtcttcatctgcccccaacagccccgtcctcagcagaaccctgtcccaccctccccgctgctgttccacacctgacctccctaccccacaccaggatccaccccaacctgcggtccaccgtctactgcaacgctatcgcccagggcggggaggaggagtgggacttcgcctgggagcagttccgaaatgccacactggtcaatgaggctgacaagctccgggcagccctggcctgcagcaaagagttgtggatcctgaacaggtgagtcttggcgcagggtgggactgcgagagccctctccccacctggagaaccaggcaggcctccacactcctcgccagatccttcacgtgacccccacagacctgttgaggtggaggcagtatttccaaagtaaccggtgcagactggaagctttaataagtgatagagacaagatatggactcaggtctgggtccatgtcctctgttcctagctgctgtggcctcttagcctttacctgacaacaactcgtcttcccttctgtcaaaggctctggtgtagctggacctgggtcttttcaaacatccagctgggcaccccctcaagcccttggatgagggtccccacctcccaccatgtgcctcatatgccattacctggatgcagtaaagaagagccacccttgggcagggtgtggtggctcatacctgtaatcccagcactttggaagactgaggtggatggatcacctgaggtcaggagttcgagaccagcctggccaacatggagaaaccccgtctctactaaaaatactaaaaatacaaaaaaaaaaaaaaaataggcatggtggcacatgcctgtaatcccagctacccgggaggctgaggcaggagaatcacttgaacctggcaggcgaaggttacagtaagcccaaatcgctccactgcactccagcctgggcgacagagtgagactccgtctcgaaagaaaagaaaagagaaaagaaaagaaaagaaaagaagggccaccctcagtgtcaaagacgggagtgaccacccacctggtgccagggcttggggcgctaggactccttccttcattgattcattgtcaaatatttctatgtcaggcatgacactagcttagccagtgaccctgtgaccctgcttaggtgactcagttttccatctatagagggaagaaggaccaaggggtccctcagcccctggcaggccgaggggatgttgagaggatgcaggcataggtgatgtgcgtgggacagtccaagttctctcctgagtcacctgaattagcagtagctgagacagcatctggccctcttaggtacctgagctacaccctgaacccggacttaatccggaagcaggacgccacctctaccatcatcagcattaccaacaacgtcattgggcaaggtctggtctgggactttgtccagagcaactggaagaagctttttaacgagtgagtctgtggaatgggtgtcagggacagcgagcgccgaggctggggccccggggggtggcctgtgcgggtaagacacgccgggggcactaaccagaagtggacaaaaatcagccaagcctgggggctagggtggggcaggaatggaaagacaagctggggtatgggccgtcccttttcccatttggaaggaaaacgtggcgtgtgggcgtattctccagaagagaggggagtgaggaactcggcagtcagacctgtgttcaagctgtgactcccccacatcctagtggggtctcccagggcgtgtcatttcatctcctctataatcatggctccctacccagtaggtgtgaggatgagcctccttagttcccggcctccctcacagttcacctctctccctccctgcagttatggtggtggctcgttctccttctccaacctcatccaggcagtgacacgacgattctccaccgagtatgagctgcagcaggtaagaagtcattccccagacctgggctctgcctacttccttcccaggccaaaggggcactccattcttctcccacgtggccctgagggagcacaggctccacgccgccaggccttcctcatttacagaggaagccgagtagccagactttggaaatgttgataattcaatttaaaaaattcatcttgggatttttgtataggcacaaaagggaagagtggtataatgaacctccatgtacccgttacccaggttcaacaattatcaacattttgccagtactttttccgggcgggcaatttttaagcaaatcactgatcatgtaattttacctctaaataatttagtcatatgaaaaataaacgcattcttttattttttttattttttattttttttttgagatggagtcttgctctgtcacccaggctggagtgcagtggtgcgatctgggctcactgcaagctccgcctcccgggttcacgtcattctcctgcctcagcttcctgagtagctgggactacaagtgcccgccaccgcgcctggctaatttttttgtatttttagtagagatggggtttcaccatggtctcgatctcctgacctcatgatctgcctgcctcggcctcccaaagtgctgggattacaggcgtgagccacggcgtccagcttttttttttttttgagactgagtctcgctctgtcatgcaggctggagtggtgcagtggtatgatctcggctcactgcaacctctgcctctggggttcaatcaattctcctgcctcagcttcccgagtagctgggattacaggcatgcgcccccacacccggctaatttttgtatttttagtagagacgaggtttcaccatgttggccaggctggtctcgaactcctgacctcaagtgatccacccacctcggtctcccaaagtgctgagattacaggtgtgagccactgcgcccagcaataaagggattcttaaaacataatcacactgtccttagcaaacccaggaaaatgattatcttcttactatcatatacccaaggcatattcaaattttctaagttgtttataaaaggtctttttacaattgatatatatgcttgaattagaagcttgacaaagtcaactaacagagtgacaagcttttctcattgcatcatatcaaggggtacatgatagcagcatgactcactactgctaatactaaccttgatcacttcaagtggtgtccgccaggtttctccactgtagagctactgttttccccttcccatcctctgtaaggagcaagtcactacatccagaccacactcaagggaaaatgatagaagtaccacctcctggccaggcgcggtggctcacgcctgtaattccagcactttgggaggccaaggcaggcggatcacctgaggtcaggagttcaagaccagcctggccaacatggtgaaacccgtctctactaaaaatacaacaattagccagacgtggtggtgggcacctgtaatcccagatactggggaggctgagacaggaaaatcgcttgaacctgggaggcggagttgcagtgagccgagatcgtgccattgcactccagcctgggcaacaaagagcgaaactccctttttaaaaaaaaaaaaaaaaaaaaaagtatcgtctcctggaggtaagagaatcaaagaatttttggacatgtgttaaaaccaccacagtaattaataaacaccttgagggagatactttgagaggatgctgatgtgctgtttctctttaatgttttacccaccaatctcagcactcatcattggatcttgcctgctgcagttatcactgggacaatagaacatattttattcaaatgcttgttgccttgatttttaacctttaaatatttagatacatggtatattggcctctattttatactcttgtccaagccccctccaatgtcaggtatttgaggaacatatgcattttattttgttttttttttgagaaggagtcttgctctgtcacccaggctggagtgcagtggcatgatctcggctcactgtaacctctgcttcccaggttcaagcgattctcccacctcagcctgccaagtagctgggattacaggtacctacaagcatgcccggctaatttttatatttttagtagagacggggtttcaccatgttggccaggctggtctcgaactcctgagctcaggtgatccgcccgcctcggcctctgaaagtgctaggattacaggcatgagccaccacgcctggcgaaggatatgcattgtataatgctttgtgtattcaaggaaacttgtgcaccatctgtattggtttcctgagcctgtcataacaaagtaccacaaactgggcagcttaaaacaatagatatttattccctcagagtcctagaggccagaagtgtgaaattaaggtgaccagaagattactttttaagaaaaaaatttagccaggatcccataccatgggagaacaacctttcctaggttaacatatatttgctatagaagctgagcatgtttctttgacaagataaagtcccacagccaacccatgggttgttatctcctcaaatattggtcagaagaattctttaggtacatctttcccaattctaacccttcctcagacacacttctctcagttgctgattctgtatttgctgccctcctccccagacaggtaaaactgaaggcaaaatgtcagtggatgtgatcacttcagcagcacatatactaaaactggaacgatacagagacgattagcatggcccctctgcaaggatgacacacaaattcatgaagcatttctttttttttttgagatggagtttcactctgttgcccaggctggagtgtaacggcctgatctcggctcactgcaacctccacccactgggttcaagtgattctcccacctcagcctcccgagtagctgggattacaggtgtacacatcaccatgcccggctaatttttgtatttttagtagaaatggggtttcaccatgttggccaggctgagaactcctgactgcaggtgttccacccacctcagccccacaaagtgctgagattacaggcgtgagccgccatgcccggccccatattttttttaatgtcaatggaatttaccatttgcaacaaagaaaatgtgggggctgggcagaacaatttggttaaaaagctgttgcatgagtgctgttagtgtgagaagcccctgtttctcttagataggtggtggtgggttgaggggataactctccatgggaaagttatgtggggcatgaggacttgcaataaccattgcagaactacttctccttcagtatgtcaaagttgcctggtatggaggtggctggtctctttgccagcagttctaagaagaagacaggccatttctcagaggaaacttgtggctctcttacagttgctcaatggttctctggtttcccaatgcaggagccggagatatttggctggatgtgtataaattgcccaaggagacttggctcaagaaactagagcacccccaactcacttcaaatccaaagaaaaaagtcagacagccgcaactggtaggaaatatctctgctttcagctgatatgtttctccctacccctgacccacatctagcccaagtccttggaaacttatggtgaatgaggcctctgggctataagagaggacaacaggaatattggcccctgtctcccaagtcaatttcctttggttaaaataagatattaaaaagtagaggtgtcttcagtagtgggaatcgcagtatctctagtctgggagttgcctctccactgagaccactcccaggcatttctctggaaggagggtcttttgtcctgactcctgcttcactggtaatctttttttccctcctggctgaaataatcttttcatgcctcaaattccattaaatttttccagactatggtataaagaggttgttctcaatatacagaaatatatatatattttctattatccttagaaagtagaaactctaccatttcagtttatttatatatgatgactgggccttgtgctgtttttttgtttttgtttttgttttttgagtctcgctctgttgcccaggctggaatgcagtggtgcgatctctgctcactgcaacctctgcctcccgggttcaagcaattctcttgcctcagcctcctgagtagctgggactacaggtgcacgctgccatgccaggctaatttttttgtatttttagtagagacggggtttcactgtgttagccaggatggtctcaatctcctgacctcgtgatgtgcccgcctcggcctcccaaagtgctgggattacaggcatgagccatcgcacccggcctgtgctatgtttttaagatatagttgctcagtaaatattaagacttaatttgcttatttatacagtgtatgcttattatttttacttttaaaccaccaacattaatatattaatattaactgagcatccctttaaaatacattgtattaggtgctaaataaattagtgaaattattaatataggagaccaagattgagagttacattcactgctgagctcaagtggctttgaataaatgcctttatggccagtgaatatcttcataatggagtgtagtcctatgtccctgggaaagttactagcccagagatattcctcctctaagctattacagaatgttattatttgtatgtattttttgacacttctcacatactgcctaggtttgtagttatcctgttatacatgaaaatcctcttgtcttcaatggataataaatttctagattgttaagatcataccttctgctttttatcaacaaattccatagtatcatacttggtactcaaaaagatatatttttgtttggactaatttgttatccaaataggaaaagcaccttgaatggggtggtttctcaccataattcacttctttttcatacactgagaagcagccaatgaatgccagttacagtggtagttcttttactacgaattatatttagagttacttaaatgtaattctcaacatcaccaatatgttttgccaatcagaaatatttgcctcaatttggattcttgtaatggtgttctgactgatctcctcaactctattcattcagatttcctcttgttattaactatttcctgtttccccacctaccttttaagatcctgaaaaatagggatcgtgtgttgaagttctgcaggccagaggcccacacaaatactggccctccacatctgttgcatgaattcactcacaagagtaattgaggggaagagagagcatgccagaagattaaagggggtggtaaacatacatcaaacctattgtgaattaatttctcatttttcttctcagaactcccttggtcccatttctgcagatcctttagaaatggtaagaaactttaaagaaaatctccagagagacttaagtttgtattttagagattttttaaaaattattatttttcttttcttttctttttctttcttttttttttttttttttttttgagacagagtttcattcttgttgctcttgttgctcaggctggagtgcaatggagcgatcttggctcatcgcaacttactgccccccaggttcaagtgattctcctgcctcagcctcctgagtaactaggattataggcatgcactaccacgcccggctaatattgtatttttagtagagacagggttttctccatgttggtcaggctggtcttggggtgccgacctcaggtgatctgcctgccttggcctcccaaagtgctgggattataggcgtgagtcaccacactgggcccaagattttgatttttacttgaaatttaccctaaatgtcaaatatgctaatgaaatgttccacctgggcactattttcaattctcagtgacttaatcttgtgcctcatatccattgaagatgacctcccgtccctgaggacagttgacccaagtcatttggccagacgtgggtttacctgaagttaagggagcttaaatttcagggcccctcacttgggcccctggaaggggccctagcaatgtgttcatatggttatatatttttgtaaaattagcaaaggtaacatattgtaaccataatcacttaattccactacctcttcactctagctttcctctgtcacaatttcctccatattagatggaattacagtggccatgggcattttgtgttcatagttctgtcttctttttcttaaaagagggtcctatgaatcctggatttgcctctaccaaaataacagcccaattcaccaagccgagtaacttgggggttttgtgtttgttttggaataccttagagaacagagcagtttccctggagcttcctggctcttcctctgagaccaggaacataccatgtcttcagaaagcatggctcttggaggactcaggcgtgtcagtagagtagtggtgaacttctgaagtggaagtatctcgctagagccccttcttttttccctttcaaagttacattaggccaggtggggtggctcatgtctgtaatcccaacactttgggagcctaaggcaggaggatctcttgagctcaggaatttgagaccagcctgggcaacacagcaaaaccttgcctctacaaaaaatacaaaaaatggccgggtgcagtggctcacgcctgtaatcccaacactttgggaggccgagacaggtggatcacgaggtcaggagtttgagaccagcctgaccaacatggtgaaaccccatctctactaaaaatacaaaaattagccggatgtggtggcgtgtgcctgtaatctcagctactcaggaggctgaggcaggagactcgcttgaacccgggaggcggaggttgcagtgagccgagatcacaccactgcactccagcctgggagacagctgtctaaaaaaaaaaaaaaattagccaggtgtagtggcatgtggctgtggtcccagctactcaaaagactgaggtgggtggatggcttgagccctggagtggaggctgcagtgagtcgagattacaccactgtactctagcctgagtgacagagcaagaccctgtctcacaaaaaataataaaaataaaaatagttatatttcacattgtacaaataatatatgaatatatcactcttggaaaagtcaaggaattcagataaacagccctctccagaggtaatcaccattattagcttgacatgtttttttgtttgtttgtttgttttgtatttttagtagagacagggtttcactatgttggccaggctagtctcgaacgcctgacctcaggtcatccacccgctttggcctcccaaagtgctgggattacaggcatgagccaccgcgcccagccccagttgatgtgtgttttctagatctttagtgtgtatttacatcttacgtttattttgaaaaatacagttttgtttcatggaattttttttctacataagtggcatcatactgtatatattttcttataaacttgcatttttttactcatcaatttgtttgcacatttttttctttttcttttttcattttgaaacaggggctcactctgtcactcaggctggaatgtaatggcatgatcatggctcactgcagcctcaacctcctgggctcaagcagtcctctcacctcagcttcccaaatagctaagactacagttgtgtgctgctatgcttgtctaatttttaaaaatttttatagaaaaacatgttgctcaggctgggcattatttcttcttaaaatgttaggtagactttactaatgtgtccatctagtcctggagctttctttgtggaactacaaattcaactcctttaatagataaagcactattcaggttatctatttcttcttgagcaagcttttgtaccttgtgtctttcgagtaatttgtccattttgtctaagttgtcaaatttattggcttaaagtggttcataacattccattattatcccttcattgtctttaaaatctattgtgatgtcatccctctcattcctgatattggtaatttgtgtcttctctctttttttcttaatcagtttggctaaaggtttgtcaattttattcatcttctcaaaagaacaatattttagtttcatatatttttccctattgtttttctgttttctatctcactgatttccagtttgtttttattatttcctttgttctgctcactttgggtttagtttcctcttctaatttctttctttctttttcttctttttttcttttttttttgagatggaatctcgctctgtcacccaggctggagtgcactggcatgatcttggctcactgcaacctccgtctcccaggttcaagcaattctctgcctcagcctcccgagtagctgggattacaggtgcctgccaccacgcctggctaatttttgtatttttagtagagacggggtctcaccatcttggccaggctggtcttgaactcctgacctcgtgatcccacctgcctcagcctcccaaagtgttgggattataggcctgagcactgggcccagctcctcttctagtttcttaaggtagaagctcaaatcattgagatcgtcttttctgatataggcatttaatgctatacacttgtatctaagtactgctttaaaatttgatttttttattttcattcatttcaaagtactttataatttgcttttgtatttcttctttgactagtaggtttttatttttttatttttgagagagagtctcattctgttgctcagactggagtgcagtggtgcaatcttggctcactgcaacctctgcctcccgggttcaagcaattctcctgcctcagcctcccaagtagctgggattacaggcacatgtcaccatgcccagctaatttttgtatttttagtagagatggggtttcaccatattggtcaggctggtcttgaactcctgacctcgtgattcgcccgcctcgacctcccaaagtgctggaattataggcgtgagccactgcacccagccgactagtagatttttagaagtatgttatttagtgtccaaatattggaaatgttacagctggctttttttatgggcttctcataaaatccgttgtgatcagaaaatccattgcgatcagaaaacatactttatatatttgaatcattttaagtttatttagatttgttttattcccacaatgtggattatattggtaagtgtttatatgtacttgaaaaggatgtttgaagaccaataaagctgttattggtcaggctattcaagtttttctcctttctgtttttccttttatatccttactatattcttactgattttctgtttacttattctgtacttattgaaaaaggagtctctaagattgtagatttatctttttcttctttcactcttacgaatttttgcttcgtgtattttgaagctttgtaattagatgcttaacaatttggaatgttttgtcttcagatgaattgattgttttgtcattattcactgaccctttgattcctgataatattctctgttcagaattcttctatgtcaaatactaatatggccacccaagctttcttttgattcattttagcaagatatatctttttctgtacttttattcttaacatgtttgtgtcattatatttaatataacgagtttcttctttttccctatggtttcagatagtgtttcataaaatgagtttcttggccacatgtggtggctcacacctgtaatcccattactttgggaggcagaagcaggaggatcacaggagcccaggagttcaagatcatcctgagcagcatggcgagacctcatctctgcaaaactaaattagccaggtgtggtagtgcacacctgtgagatcccagctattcagaaggctgaggtgggaggattgcttaagctcaggaggtcgctcctgcagtgagctgtgattgttccactacactgcagcctgggtgacagagcaaaatcctgtctctcacacacacacgcacacacaaagtttctttttgacctcatatagttgggtcttgccctttctaaaaaaactgtttcaaagatgggctctcgctatgttgcccaggctggaatgcagtggctattcacaggcacagtcatagcacattgccacctcaaactcctggcctcaagcgttcttcccacttcagcctccagagtagctgggactacaagtgtgtcaccatgcccagtaagggtctagcctttttatagagtctgacaatctctgccttttcactggggttatttagaccatatacatttaatgtgattatttatatgtttgggtttaaatctacagtcttgctatttacttttacaatcttgctatttactttctatttgtcctcttatttttctttttccccttcttttccaccttcttttaaaattagtatttttaattattctatttcctctcttctcttggcttattaactatgccttttccttgttttaggatgcaaatgttagttttaaaggagacattaaattgagtcttccagtttacataatgaagatcaaaccacctaagcctgttacaggtaagtgtgattcaaatctctctccttttgccattgatttatctgttctttcttcctttccccatgtcttatcttttcaacttattagcaacgatatcaaaattacaaacatagttatgaagaggaaattttttttaaacccataagctctgagacattaaaacaaaaaatgtaagtaatgcatttgtattacatacagttaactaacagaattggaaggtcaggagaaaaagatatcttttctgaattgccaggttgagttcatttattcctacatttctgtgctgattcatttgactgctagttgtaatacattcattcctacattcttgtgttaatttattcattattatttgctgaatgcccataatgcaccaagcacaaagatgagtaaaacacctctcctctcctgcactctagaagttgatagtctactaagggagaatgacaagaaaccaccatagtaggatgtgataagtacagcaatggggaccatcaagggctgtgaaaactcagggtaagaagcgactgacttgctagggagtaagggacatttgggcacagtttcaaagaaagggacttggtcaagaggagcagagaggctagctattgtaggcggcaaatacagaggatatcctctcagcattcacacatgatcacaaagacatatctataagaatgttcacccctggtggactagtagttacgattaaaaaaaaaaaccagaaaaatgtttacggtagcattatgtacagaggtgaataattggttaaataaaatctgggccgtgtgcggcggctcgtgcctataatcctagcactttgggaggccaaggtgggcagattgcttgagctcaggagttcaagaccagcttggggaacatggcaaaaccccacctccacaaaaaatacaaaaattaggcagagtggcatgcacctgtggtcctgactacttgggaggctaaggcagtagaatcgcttgagcccaggaagcagaggttgcagtgagctgagattgtgccattgcactccagtctgggagatgggagtgaaaccgcgtcataaataaataaataaataaataaataaataaataaataaatctggtacactcatacaaaagaatactttgcaaccattaaaaaaacaaaagagaggccaagtgtggtggcttaagcctataaccctagcactttgagaggccaaaggaggaggatcacttgagcctaggaagttgaggctgtagtgagctatgatcacaccactacactccagcctggtgacagaacaagaccctggttcaaaatcaagaacaaccccccgaaaagggaaatgccaaaggcgaagaatagacaattttctcttgtaaaagaatgtggtggtcagacttgctctatcaatatttattataaagctgcagttattaagataaaaaatagataagtgaataatagaaatatagatgaaatatagaaatatagatagatagaaatagcagatagaaaaatagaggaaaaataggtgaatgaagcaggatacagagaccaaaacagacccaggcataaatggacacttgatgcattacagaggcagcgctatggagctctggagaaagggtggccatttcaataagtggtggtggctgtttatgtggagacaaaaaataaaacttaacccctgcctcatgtcgtacacaaaactaaattccagatgaactgtagaagtaaatatatgaaaggcaaagcagtaaagcttttagaaaataaatatactcttcaggcccggtgcagtggcttatgtctgtaatcccagcactttgggaggtcgaggcaagtggatcacttgaagctaggagttcaagaccagcctggccaacatggcgaaaccccgtctgtactagaaataccaaaaaaaaatagctgggcgtgatggcgtgcacctgtagttccagcactttgggaggctgaggcaggcagattgcttgtgagctcaggagttcgagaccatcctgggcaacatggagaaaccccatctccacaaaaaaaaatacaaaaattagctaggcatggtggcctgtgcctgtagtcccagctacttgggaggttaaagcgggagaattgcttgaacctgggaggcagaagttgcagtgagctgaaatcgcaccattgcactcctgcctgggcgacacagcgagcgagaacctgtctcaaaaaaaagaaaaagaaaataatataaacaataactttatcacctctgggtagggaaagacttttcaaataagacacaaaaagtacttacaatttttaaaaattgaataaatttgactacattaaaattaggaatttcagatcattcaaagacatcattaagaggatgaaagatcaggccacatagaggtagaagttatttgcaaaacacataaaacccactaatggttcatgtccagaatatatgaagaattactacagattcttaagaaaaagagggagaatccagtacaaaacatgcaagagtattgcacaggctattcacaaaaaaaagattatttaaatgaccaataaacatgaaaaggtgctcaccatcattagtctgcagggaagtgcaaattaaaatcacagtgaagtagcgtaacacattcactaggatgggtaaaattaaaaagactgaccacaccaagtgatggtgaagatgtggaacaatcagtactcccatacattgcatttagcaatgaaaactggtacaaccactttggaaaatgtgtttgctattatctagtaaagctgacaataatttgtgtcctatgacacagtatttacactgctaggtgatagggtgaccaaccataccagtttgcctgactgaggggtttcctgggatgtgagatttttcagtgctaaaactaggaaactcctaagcaagccattttgagttagtcaccctacttctaggaatgtacccatagatttgcaagcaagtgtgttccaggaaacatgtgcatgaatggtgatagtgacatgatttttaatagccccaaacacaaagcaactaaattttcatcagtagtagaacagataaattgtactatatttattcagtgggatactatacagcaatgaaaaatgaacaaactgcagctacacacagcaaaatggataaatctcatgaacaatattgagcaaaagaggacagccatagagttaatactgcatggttccccttatgtacagtttagaatcaggcaaaatgaaactatggtgttgaggacgcatgtttaggtgataaaagcataaataaatgcaatgaagtggctaccataaaggtcaggagagtggttgccactcttcccagagaattgtgattagaaaggggcccctgggaagcttctagtgagatggcaatgttctatttctttttttttttcttttttcttttcttttttttttctttttgagacagggtctccctctgtcgcccaggctggagtgcagtggcacaatctcgactcactgtgacctctgcttcccaagcaatcctcccacctcagcctcccaagtagctgggactacaggaacatgccatcaggcctggctaatttttgtattttttgtagagatgggattttgccatgttgcctggctggtctcaaactccggggctcaagcgatcctcctgccttggccttccaaagtgctgggattataggcatgagctaccgcacccagccgatgttctatttcttgacctgagtagatgataccagaggtttgctttataataactcattaaggtatattaaggtatatattttatgctcttttcagaatgtatgttacacttcacaataagaaaaaggtttaataactaaagataagcaacaatgaagaggatctatagtactaatatgaaataatctctaaaacattttagtaagtgaaaatacaaggggaataatgtataatagcaattctcaaactttagctgcatcagactcatttggagaactcattaaaacccagattgtttgcctatagtgccagctactcaagaagctgagatggaaggattgcttgaaccaaggagttcaagcctagcctgggcaatagaacacaacccccatctcaaaaaacaacccagattgctgggccccaccacagagtttcttctattccagtaggtctggggtgggccctgagaatctgtatttttaacaagttcccaggtgactctgccactgctgatctggcatcgtcctttgagagctagtgtatcatacgatattatgtgtttataaaactggtgtctgcctctagaaaattatgcagttgtctctgaggaagcagtcaagggcactgtggaatctcctgggcaacttgagggacgcaggtaccttccaaagtgaacagaattctgaaactcagggtgcaaatccagaaaactagtcatccagttttactgtggatttaggaacagatgaaaaagaaggaaatgaaaggttattgggaagagaagtagtaagaaaagtgactgacagagaaagatttttttaaaggaaggtaattgggtaaatgttggcataagaagagactgagactgcctaattatgtgagtgttcagcagtggctgaaaagtgatggtaactggcagatctggggccttcctcagctggggagacagggacagtgatctaaagtctccagtggcattgtgaacatttccctgccccaccgccccccacaccctggcctttgcaaatattctgtaatccaaaagcagagagaatgatgttgggatgaagatacagaagaaggaggacagcagctgctctctgcctgggctctgtgagctggtggggtacaggagaggccgggagaagactgaatacagaccaattgcagagcaagaatcgatttctgaggctgagggattctgcaggaagctgggaagagtggaagaagtaggggaaaatcaggaaagggggagtcacatggcttgactaattctgtaatattttcaacctaggcaccacattcaaaagccccctggaagtctttgcaaagatcaaggactgctacggactgggctccgggcagaatcatttcatcaaggacagtcagtgggagcagcaagctgagatcttcaacgcttcctacaagaagtacctagatagggagtgggaggaagagccactcaggtgagcctcctaatcccgggaaagccagggagcatccccaggcttctgctgtcttggcacatgcaggaatcaacccagggacctgaattaatctgagatttaaaagctctttctggggccgggacagtggcccacatctgtaatccctacactttgggaggccgaggcaggaggatcatttgagcccccaaatctgagaccagcctgggccacatgtcgagaccttatctctaaaataaataagctctttctggtttgggagaattttgagcgaacatcagcagatattttgaaatgttgtgtggagattgttactatatagttagaacaaaggctgataataatggagttaaaagaagaaatagatatctatggaaatgagaaatataatttatttcagttttatacatgacagctctaaaaatttttttttctttttaaatttttttttctagttatctaaaagcacagaggctgggcacggtggctcaggcctgtaatcccagcactttgagagtctgaggcatgcagattacctgaggccaggagtttgagaccagcctggtcaacacggtgaaaccgactctactaaaaatacaacaattagccgggcatggtggcgggcacctgtaattccagctacttaggaggctgaggcaggagaatcactggaacccaggagatggaggctgcagtgaggcgagatcacgccactgcactgtagcttggacagagatagactctgtctcaaaaaataataattaaaaaaaataataaaaaacacagaagatcctaaagacaaataaagtcaccactactaaaatttttctccatttccttcctgcctttctaaatgtaatgtagcataggtgtataattattataatatatgactttcccatcttggtgagcagttaggtgtcattagctccaagttgtgttggagagccccagtctttgaagtatcaatgagggagctggttttaggaattaggtctcctcatagctactgtggatctcaggaatgttcttgttctcacatgggaagtgaaatctctcgtgctgtcaagtggaccttaaattttcttacttcaggacacaaagtcctaaggctaatccctgacaacagcttcctgttactgtctggaactacgtcaagattcagtggtatgctggggctggctcctactgcatagtgagataattagggttttgcaagccagttgttaaaccactgttagttgtccattgtgggagcattgacaccatgaaaatctgcaaaccctataaattggggcctcttttatttaagagacccagttatcagcacaacactggctgtattgcccctgggataagagaacatctatgtagatcacccgagtctgctctttaaggacatcttccccaaaacagaagtggctctccaaaagacagctgtctctggcaagagctctgcacaccacactggcctaggagtgattcccagccccacccaacctgccctcaccagcatccaaggtcagcgcatcccaccaggaccagcacctagaatgtgatgtgcttcatggccttcttacccctgggaaggtccattctaactatctattctggttttaggaccaagactctgccagcagctctccttgccagggagtctacatggctctgactcgtgtgtctttctttcccagtacggccaccttctatttccttcttcctagctgcctatttgcaatgccaccggaagtcaagggcccctcaggtaaatgaacatgaagtgggtggttgtcctagcaaggagtcaccttggggaaacccctcagcaagcccccacagagatgttccccaacaaacctcgcatggtaggagggaatgaagaggggagtttggttgccagctgtagcctgtcagtttctgcttgcatctgtggcccctgagcacaggttctctgatcacaaaggctggcactgccttcagggagtggttgccataggagaaggcatgagcccacatccaccgggctgcttctggatatgagtttgtcttgtagaagatgttacttaaaacactgagggtgtgaattttctagatgtgaaagcagccgagggggagttgagactgtcctccctatgcaagaaggcgggtgggccccaggaacagccctcatggggctgcccagtccctctctcttgggaaactcacccttctcttgggtgctgcccattaaaacaaaccacttcagacttcaaaccagcttctcttgggcaaacaccttctgtgcaaaccaaaggccacccagatttccccctgtgtaacacccattttctgtctttcccccgcccccccaccaggaatggcctgtgtccttggtatacactggaccagaagtcacaatttcttcctgtattcactaaaccgaactctaaaggataaagctggtactttactgctgagatgggagtcgcctaagctcaggacttgcagacatgtccttctccagcttagctaagagcatgtgactgacatacatcaagtgtcactttagggaccagatctaggcaggcagtagggggtttggtgggtgtagtgtgaccgcaagaatctgtctctgaaatgtcatgttccttaaagacaacaggtcaatagggacaaagtctacagtcaggtccacagggctccttaagcagctaaggtaaaaagagagtaagcttggctgggcgcaatggctcacgcctataatcccagcactttgggaggccgaggcgagtggatcacctgaggtcaggagttcaagaccagcctggccaacatggtgaaaccccatctctactaaaaatacaaaaattagccggatatggtggcatgcgcctgtaatctcagctacttgggagtctgaggcaggagaatcacatgaacctgggaggcagaggttgcagtgagccaagatcacaccactgcactccagcctgggtgacagagcaagactatctcaaaaaaaaaaaaaaaaaaaaagagagagattgagaaagtaggcttggaatcagaaggtcagtgctaatcctagcccagctgtctgcaaaccatgtagtctcaggccagtcgcttcacaccccaacccacttttcatgcagaacatagagctaattaattacaccattgttgtctagtgcatgcgtttgttgaaaatagcaaaatccagagagtttctgtatgtgaagctcttcgaaattgaaacgcactaaggaaatataggttgttgttgttttacaaatttatggaggtgaccaggtgtggtggctcatgcctgtaatcccagtactttgggaggcagaggcaggtggatctcttgagcccaggagtttgaaaccagtctgggcaacataggagaccctgtttctacaaaaaatagccaagcgtggcagcatgagcctgtagtcccaactactcaggaggctgggccaggaggatcacttgagcccaggagtttgaggctgcagtgagccaaggttgcaccactgcactccagcctgggtgacagtgaggccctgtctcaaaaaaaaaaaaattaatggaagcagtcacatgagcaagtttgctttgtgataattccttgaactgtacacttgttatactttatattacacttcaaaagtaacattaaaaaattcacaaaggaggagtttcttttcttccgtccctttcccaggcaacctggcttctaatctccttctatactgactgtatggccttgagcaagtcacttctctgcctcatctataaaatggggatactaataagactactttatagaacccttgtgagaatgcaatgaaattatgtgtgtaaagtgcctaacacagtatctagcacctaggacatactcattaaacattagctgtagagtaataataaacagtgtgacattatcttatcatcctaggcaaggagaatagcacttcataaagagaaggatgatggtgagtccagacaggtgctcctggttcccattccctgaacaggcagaccagtctgagtcacaggttgtccaggtagaagtgatgggtaggtgcagagtctgggggaaccggttgagtattgtccttccccctagaccccgagggtgtgtggccctgtgctgcgcccattgcagtctctcagctcagctgctcctcctcctacctggtgctggcctgcgaggatggtgtgctcacgctgtgggacctggccaaaggtaagtcctccctgcctctctacctagtacctgggtgggactctgggcaatgagtctgggagctctggaattcccacaggccctgggccttctgttacctctgtgttcttaaagtcaccttggggaactggtcctactcccctctcattcatttattcaacaaacatttattggatataatatgtgctaatgcttcccactgcccatgtgtttattgagtgacttctctgagcctggcactgtactaggctctggaagtatgatcattgccttcattattacactccagtgaagaagtatgtctggcacagtacaagtgatcatggtggcctcagccttcctcttcccagcccccaagctctctaaataagtgagtcttcttccctgctattctgtctcatccccagtcagcgcaaactctattgtattagagctaagagacctataaagcagtcaaagtgagaccagcagctattctgggtgggtggcactgtggttgagttctagggtcctgggtccagctttgcagatacagaaatcaatgatattgcttcctaaattcgtcagcctctagagaagcagctccctctaaccggactttgttaaaggccagtaatgactcagtggtttgccattttgcagttggagatgtatttacctagagagtggaggtgggccaccttcactgggcagccctcctggcaggtgcagagcatcagagatagtaccctgtttgttgggtagcttgtgatcagaccagggagttgactgttctcagggaggtgtctgtcaagctagcaaattgccttcctcacttggctatcactttctgaagaatgcagtggttatttcaactttggaggatattttccccacacactgctaagataaacaccactaaagaccctcctttattttacttattgaaccaacagcattattatagaagcaaaagatatttcaaggaaagaagaatgatgatgatttcataagcccttgaccaaaatagcttgttttcatttttttctggatattaagttcttgttgtttggccacacacacacacacacacacacacaccgccttttctgaaacagctgtgcctccccctgcccatacgcctttgcatcccatggtcagctgcgcctcagtccctggctgggttgtagcttccttccactccagtgctgaccctgccctcctccatgctcttgcttctccccctccccaattcctctccagacacagcagcattcccctgcagggggcttttctctcccattgggcactaggtttactgattttctctcacagggtgctcattgcttgattttgccttcacatcctacaagtccctcacacacttgctggtcacagcccctgtgcccatggcctcctcccctaccccgttttctgaccggcttgtgtgattactttctctaggattccctcttggggtcgctgctcttcctcagggatgtttctgccaaagcattcacttcctaaaatatttctcggtccacaaaggacagaatatgtatcctgaaggtcaagtgaaatcccaaatgaaatgtgtggtgctgtgcacagacgcctccctccatctggtggaggctagcgggacccaaggacccaccatcagtgtgcttgttgagaggtcagtagcttgagggtgggacggggtaaataattggccagattattttaattgctatttgatagtaaaatctgacagcctctctgactacagtccaccttttgtatagtcatcactctcctggtgagcttctgaagatcaccaatgtcacatatatgttacaattttttctaacaaaattgtatgatagcacagatgacatctgctatggtttgactctcccctccaaaacccatgtgaaaactcaatccccattgtggcagtactgtgagatggggcctttaggagatgattggatcatgaaggctcttcccacatgaatggattaacccactcatgcattaatggattaataggtgaatggattaatgggtatcatgggagtggaaatagtggctttataagaaaaggaagagatacctgagctagaacatgagcacactcaattccctcaccatgtcacaccctatgccgtctcgggactctctagagagtccccaccagcaagaaggctctcactagctgtggacccttgaccttggacttctcagcctccagaactgtaagaaataaattcctttgctttatacattatccagtttcaggtattctgttataagcaacagaaaatggattaagacaacatccttcccatcccatacggccaagaagaggctcatttctcccacagtaaacttccatcagtttctccagggatctctctctcttttaaacatttaaaaatacctaatgcatgcaaatgaacctgtataatgtgtgtgtgtgtgtgtgtgcgcgcgcgcatgtgtgtacgtgtgtgtgtgtaataaagaataatgagatcaactcccctgaaaccgttggaaatcgataatctccagttccatttgggctccctgcatggctctccctcatcaatccttcttgctccgccccaaacaccttattaattacctaatgctaaataacaaaccaccccaaaacttaatggtttaagaaaatagtcagtgtttagtccttgagtctgtaggtcagcaatttggactggactcagtccgtttcttctactggtctcacctgggctctcaaatgtgccttcaggcagctcacagctcttctaagatagcttcactcacacacctggcagttggcaggttattggccagtgcacctcggttttcctcatggtctctcctgcagactagtacagcctttctcacatggtagtctaagggctcctagcagcaggagagggcaaccatagcacacaaatgcttttcaagcttctgctcatgttacatttgctaatgtcccattgggcaaagcacatcccacatccatgcccacattcaagcagtagaaaaacagactccatcttttgatgggagtcactgccaaatacagccaactgcttttcaatctaccacaccatttttctaaattcatcattcctttgctttcccttaagaattaaccacatttaggccaggtacagagggtcacacctgtaatccaagcactttgggaggccaaggcgggtggaccacttgagctcaggagttcaagaccagcctgggtaacatagtgagaccccttctctgtgaaaagaacaaaaattattaaaaaaagaaaaagaattaaccacatttgtatgactgtatctctaaacagtatattatttagctatgcatatttaggaaacttacaaagcaaaccataagaccagcgtggccaacatggtgaaaccctgtctctactaaaaatacaaaaattagctgggtgtggtggggggtgcctgtagtcccagctactcgggaggctgtggcagaataattgcctgaatccaggaggcggaggttgcagtgaaccaagattgtgccactgcactccagcttgggcgacagagtgagactctgtctcaaaaaaaaaaaattgatatataattcatggaccatcaaactcaccattttaagtggttttcagtaaactaacaaggtagggtgggtggggtgcttcatgcctgtaatcccagcactttgggaggccaacgcaggaggatcccttgaacccaggagtttgagaccagcctgggcaatatcataagatctcatctctaaataaataaataaataaataaataaataaataaataagctgggcatggtggtgcatacctgtagtcctagctactcaggagactgaggtgagaggatcgcttgaaccaggaaggcagaggttgcagtgagcggaggtggtgccaccgcattccagcctgggtgacagagcaagaccctgtctcaaaaaaccaaaaccaaaccaaaccaaacaaacaaacagaaaaaaaccatgtggtacaaccatcactactgtctaattccagaacatttttattacgccaaaaaaaaaccttgtactcattagcagtcactccttattcctacctggtcccctcagcccctggcaaccactaatatactttctgtctctatggatttattacctattctggatgtttcataaaatggaatcatatacacacagcctttttgtgtctgtctgccttctttcacttagtgtaatgttttcaagattcatgcatacggtagcagggatcattcttttttatggctgaataatggtccattacatggatgtaccacattttgttttcagctcatcattgatgggcatttgggttgtttcagtcttctggctgtgatgaatatcatggaccttcacgtgcaaattttgtacaaacatgttttaatttatcttgggtatacacctaggagcggaattgctgggtcatttggttactctgtgtttaactttttgagaaactgacaaaatgttttccaaagcaactgtaccattgtccattcctattagcagtgtatcacatgagggttctaattgctccatgtctacacttatctctctttccctctttttttagtatagtcatctagtgggtaggaagtggtatcattatggttttcagttatatctccctaatgagtaatgaatgacatgatgttgaatatttcatgtgcttattggccttatacacatttgtgtatctttggagaaatgggtaaaactgactatttttcttttcgagagagggtcttactatgttgcctaggttgtccttaaattcctgggctcaagcaaccctcccacttcagccttctgagtagcttggattacaggcatgtgccactgtgcccagtcttttgctattttaaaattgggttgtctttttattgtaagagttctttatatattctgaatattagacccttaatcagagatagggtttgcaagtatttctcccattctatggactgtcttttcactcacttaataggtcttttgatacccaaaattttaaatcttgatgaaatcctatttatctgttttttttccctttggttgcttatactttatgtatcatatctaagaaagtattgtctaacccaaggtcatgaagatttatacctatttttttatttcaaaaaaatttttcaaacccacaaaagacctgacgatgttttttctaagagttttattggccaggcatggcggctcacgcctgtaatcccagcactttgggaggccaaggcaggtggatcatgaggtcaggagttcaagaccagcctggccaagatggtgaaaccccgtccctactaaaaaatacgaaaattagctggatgcagtggcgggcgcctgtaatcccagctactcgggaggctgaggcaggagaattgcttgaacccgggaggcggagtttgcagtgagctgagatcgcaccactgcactctagcctggatgacagagcaagactctgcctcaaaaaaaaaaaaaaaaaaaaaaagagttttattatgttttcactcaaacgtaggcatttgatctattttgacttaatatttgtatatgatatgaggttggggtccaacttcattccttttgcatgtggatatccggttgtccaagtcccatttgttgaaaagactgttcttctcccactgaatggtcttggcaacctagttgaaaatcaattgacggtaaatataagggtttgtttttggattctcaattctatttcattcatctatatttgcatccttatgcctgtaccatactgtcctgattactatagttttgtagtgagttttaaaattgggaagtgtgagtcctccaatttgctttttttttttttgagaaagggtctcactctgtcacccaggctggagtacagtggtgagatcacagctcactgcagcctcaacttcccaggctcaggtgatccccccacctcaacctcctgagtagttgggactataggcacatgccaccatgcccggctaatgttctgtatttttctgcagagacagggtttcaccatcttgcccaggctggccaactgtgttctttttcaatattgttttggctattctgggtcccttgcaatttcttatgcattttaggatcactgatcaatttccgcaaaaaaaaaaaaaaaaaagtagttaaaattttgatgggattgaatctctagagcaatatggggactattgccatcttaatgatgctaaatcttccagtccatggacacagatttatttgggtcttttttctttttacttaggtgttctttaatttctttcaaaaatgttttgtagtttttggcattccagtcttgcacttattttgtcaaatttattcctaaatattttattcttgttgatgctatcgtaaatggaattgttttcttaatttcattttcaggtttttcattgctaatgtatgggaatacaattgatatttgtgtattgctcttgtatcctgcaaccttgcagaaatcattagttctaatagattttttaatggattccttaaaatttttatgtatgcaaacatgtcatacacatagttttacttcttcctttctggattcctttcatttcattctcttggctgattgcctggctagaacctccaggactgataactcttctaatttgtaggagtattttttttttaaacccatttatttactgaagcaactggatcatttgtggtatagaaatttccacattttagatttggctggttgcttcattagcccctctctactctcttgattggattgatattataataaaatattacacctgaaggccagaatctccctgagccaggttttgcctgggattgtcattttgcaacctctgtgttcacaaggactttgcccgggagcaaggtggacgtcctgcctatccctggaacagggtgtggtcccatccatggggactctaaagtgggagtggaaagccagaggcctgagagagctcctcctcaaggctgttagggacccagccggactgagaatcttttgtttttctggcagctggagcagttcaagaaggacaacgaggaaacaggcttcggctcaggcacccgggccctggagcaagccctggagaagacgaaagccaacatcaagtgggtgaaggagaacaaggaggtggtgctccagtggttcacagaaaacagcaaatagtccccagcccttgaagtcacccggcccccatgcaaggtgcccacatgtgtccatcccagcggctggtgcagggcctccattcctggagcccgaggcaccagtgtcctcccctcaaggacaaagtctccagcccacgttctctctgcctgtgagccagtctagttcctgatgacccaggctgcctgagcacctcccagcccctgcccctcatgccaaccccgccctaggcctggcatggcacctgtcgcccagtgccctggggctgatctcagggaagcccagctccagggccagatgagcagaagctctcgatggacaatgaacggccttgctgggggccgccctgtaccctctttcacctttccctaaagaccctaaatctgaggaatcaacagggcagcagatctgtatatttttttctaagagaaaatgtaaataaaggatttctagatgagtgagactcattactaaactaaag

SEQ ID NO: 563 - DNA, 277 bp, Homo sapiens
gagcaaagatccaagaagacaagaagacaacaacagtgcccctgagtcccgccccacaccccagtccgagtgcacttccctcatgcgacccccagggccccgtcccccacccctgcctgtgacacctgaacactggctttctctcatctctgtctcctctttcttgtcctcctcccagtgttgttcaggaagagccatgggcatcctgggcaccccctccctgacatacacacctcagggtggaccacagaatggagggcctcatagatttgctggg

SEQ ID NO: 564 - DNA, 175 bp, Homo sapiens
tttttgagatggagtcttgctctgtcacccaggctggagtgcagtggtgcgatctgggctcactgcaagctccgcctcccgggttcacgtcattctcctgcctcagcttcctgagtagctgggactacaagtgcccgccaccgcgcctggctaatttttttgtatttttagtaga

SEQ ID NO: 565 - DNA, 147 bp, Homo sapiens
tgagacggagtttcattcttgttgcccaggctggagtgcaatggtgcgatcttggctcaccacaacctccgcctcctgggttcaagcgattctcctgcctcagcttcccaagtagctgggattacaggcatgcaccaccatgcccgg

SEQ ID NO: 566 - DNA, 277 bp, Homo sapiens; identical to SEQ ID NO: 563

SEQ ID NO: 567 - DNA, 437 bp, Homo sapiens
tccactctgagagatttcccttcattcttagtgaattatttcatttggctattaatttccaaggtctccttttgatcctgtaattgttccttcttatagccttttattctttttgtgtggatgcatagcccatctctaagaataggaattaaattttatcaaggttttcttcttctccctgccttgcctttgtttcctccagatttcctttctctactgtgtttgttttggtctgtctttcaggtaagatactttcctacaatttctagtgagccatggctatccattcatatttaagagggaggcactaaaagccaatagcaagttgtatgtgcatggatttctcttaggctagtcaatttccaataaagaaatcttttattcttttgcctagagttgtatgggcctagtggtggtatgccatcattctagtaacc

SEQ ID NO: 568 - DNA, 437 bp, Homo sapiens; identical to SEQ ID NO: 567

SEQ ID NO: 569 - DNA, 287 bp, Homo sapiens
atcccagcactttgggaggccgaggcgggcggatcacgaggtcaggagatagagaccatcctggctaacacggtgaaaccccgtctctactaaaaatacaaaaaattagccgagcatggtggcgggcgcctgtagtcccagctactggggaggctgaggcaggagaatggcgtgaacccaggaggcggagcttgcagtgagccgagatcacgccactgcactccagcctgggcgacagagcaagactccatctcaaaaacaaacaaacaaacaaaaaaactataaaa

SEQ ID NO: 570 - DNA, 287 bp, Homo sapiens
atcccagcactttgggagcccgaggcgggcggatcacgaggtcaggagatagagaccatcctggctaacacggtgaaaccccgtctctactaaaaatacaaaaaattagccgagcatggtggcgggcgcctgtagtcccagctactggggaggctgaggcaggagaatggcgtgaacccaggaggcggagcttgcagtgagccgagatcacgccactgcactccagcctgggcgacagagcaagactccatctcaaaaacaaacaaacaaacaaaaaaactataaaa

SEQ ID NO: 571 - DNA, 591 bp, Homo sapiens
tgaaggtgatgctagctgctataacaaataagcacgcctgtgcacagttgctcaaagatagtagaagtttatttcttgtttatataagatccataatgactcttgccaattagcaggctgctctcttccaagtggtaacccagggactcaagctcttttcatcttgtggctcagccatctgacacatgtggcttccagcactgccctgctgttgtctgcacaaagctggtggaagaagtaggaatttgcaggaccatgtgtggagcattttaaggatgaggcctgggagtggcacaaatctttgaactccaggaggctaggaaacagagcataaccttgtgcccaggaagatgcggggcatagtacatctttgcctcacctgatgtattgtttgtttaaaatcactttggattctcatttaccttttccccctcaagatctttgtttttgactttggagataaccagaaataactaagcatgcttcgttccctctacgatttcatcctcatggggaagcaagaccccactcttttattttcatgtatgtatatatgtatgtatgcatgtatgtatgtatgtttgagacaga

SEQ ID NO: 572 - DNA, 409 bp, Homo sapiens
gatatgctttgttagcttagcatgctgttctaggctgcctttctttttttttttttttttttaaacttcatggtgagcagaacactgtactccagactgtgaggccccacctgtgcagcctgctggcttctcataccagcttccttctcaccttaaccccacgtattgttgcaacggcaaaaaagagaattgcacagaggaacaccacctatcagagttcacactgagtttgcagattcatccttttgcttccagccatcccatggaatgccgttcttggaagggtcatctcatggtccattgtcggccctcttagaagagatttcaggccttcccttgtagcttgatagttacagggagtgctagggtaagtggaaaaagcacatgacttggaataaagacttagtac

SEQ ID NO: 573 - DNA, 433 bp, Homo sapiens
ctaaaggaagacatttagaaaatttagaatataaatttctgttagtagaaactaatttctcttgctgttctctaaagtatacttgatttgaaatatgtgccctgaagttttgctatgttgaaaaaaatgatgagccgggcgcagtggctcacgcctgtaatcccagcactttggaaggccaaggcgggtggatcacctgaggtcaggagtttgagaccagcctgaccaacatgttgaaaccgtttctctactgaaaatacaaaaattagccaggaatggtggtacacagctgtagtcccagctacttgggaggctgaggcaggagaatcgcttgaacccgggaagtggaggttgcagtgagccgagatcttgccattgttctccagcctgggcgacaagagtgaaactccatctcaaaaaaaaaaaaaaaaaa

SEQ ID NO: 574 - DNA, 729 bp, Homo sapiens
cttagctgtgtcttttactgctcttcaactaccacccattcacttgcccccaaatcgagacctccaaaccaccacccaccctaagctaaaacagagaaatctagctctgtgctacttacgggtgtcctcctgccacctcacactggtcatttctaaaacagaacctgtcatttctctctctcctgtatttcccttcagtctctgggacactttctatccaagtggtcaaaccagaaacttgagacgtatggtaaatgcttccaccttctgtgccagtacctcatggcagtacttgctttcatcttggtaatatttctcacatctacctcttttttctgaaacaagatttagctctgttgtccaggctggagtgcattggcacaatcattcacagctcactgcagcctccaccttctgggctcaagtgatcctcccaccccagcctcccgagtagctgggaaaacagctgcccaccaccacacccagctaaactttttaattttttgtagagatggggtctcactctactacctgggctttctcacttggaaaattgaactccttgaactcctgggctcaagtgatcctccctctaggcctcccaaagcgttgggattacagatgtgaaccaccgcacctggcctcacatctacctcttgcttctcattttcctttttaaaagtgagaagagtcagacttgtatagcataaaaagcagagagctgagtat

SEQ ID NO: 575 - DNA, 401 bp, Homo sapiens
cataaataaatagtcctgataaagaatactaaaaattagagatccggccgccacttctaattccagtctcctcttccaagtttccagaaatgtctttggtttacagcttttcagaccttttcctgtgcatatgtatacatgtgtttgtgtgtatatatgtgtactttgtagaaaattttaaaatctcacctgagtattactttgtttctaattgttttgttggcattctccttctttctgatgactcttaacttcctatgctgcctagagagagttaaaagaagaaaatgttttgaaataatttcctttatcagatctcagtcacctgaacattaatttcaaaccaaaagagagttacagaaagagataattaaatgtttgccagtgacttgtaattgcct

SEQ ID NO: 576 - DNA, 470 bp, Homo sapiens
gtcattgctgtgtgtctcaccagcaagagtgatgttctaatgacattcattacacttagctggcctctgtaggatgactcagatatggtgtccatattgtcccatgtggttcccatttctttttttcttccctcactttgacagcgcacattctctggtagtttgctgggaaagggtatatgaaaagtagatttggaggggatttaatttctaaaaatgtctctattacatccttaagtgattgatgtttttatatggaattctagggaggaaataattttacctcggaatttgaggccgtttttccattttcatatagcatctggctttgttgttgagagagattgtgacattctgatgattgtttacatgtaagcttcttcctgggtgttctgaaatatcccactgatgcatgtaatgtggtgtgaatttactttcattcaatgtgttgggttcttggtggtctcttt

SEQ ID NO: 577 - DNA, 660 bp, Homo sapiens
ggcaacagtcattcctcagcagagtggagagggagacacatgttctgccgcgcccatgttcagtctgttctgtgggcagagttgtaggaacacacttagcccaaatcgatgccagcctggcagtgggtgaagggccagcaaggtttgtctatggctcatgaccttagggaaaatgagattttactcctcgtgcagcctcctgcctggagaattgcacacccctgtttcagataggtaacagctttcttgaagctttcaagaataaaaataaaaactttaaagtacatggctgtcagaaagtccctcctggtagctaacttgagccctttgtgcttattttatcttggccaagcctccccggagcatgtgtaccagatacgataaccttccaccaaaccagggacctctcagatctcggcttttcagaacaaagaatttggatttccttagcctttcatcatcatctcatcacccaaacctttcattatctttttcaattttttctttgaactctttccaaaacttgtcttttgagttacagagaccatcacttaattagatctttcatttccaggggatactcctagtgcctaggaagaaataaattaaatttcactcggatatatttcattgggggaagggtgtagaaaaaaagaaatt

SEQ ID NO: 578 - DNA, 660 bp, Homo sapiens; identical to SEQ ID NO: 577

SEQ ID NO: 579 - DNA, 253 bp, Homo sapiens
tgcaacccagcagcagttgagcaccttgtcaaagtgtgggaatgagcgtgtgtgggtctctgtgcttccagccttttctgcaccagctgttccaagcggagcagaggggtctgtcttgcttctccgtaacttcatcaacctgtaagtaggcttgccttttacagtgctgttctcattagctgtgcagacttccttatcctgatcattgggtatctgtgcgcagactttcataggggaaggggatagtctttaa

SEQ ID NO: 580 - DNA, 253 bp, Homo sapiens
tgcaacccagcagcagttgagcaccttgtcaaagtgtgggaatgagcgtgtgtgggtctctgtgcttccagccttttctgcaccagctgttccaagcggagcagaggggtctgtcttgcttctccgtaacttcatcaacctgtaagtaggcttgccttttacagtgctgttctcattagctgtgcagacttccttatcctgatcatttggtatctgtgcgcagactttcataggggaaggggatagtctttaa

SEQ ID NO: 581 - DNA, 84 bp, Homo sapiens
ctcactgcatcctccgcctcccaggttcaagtgattctcctgcctcagcctcccaagtagctgggattacaggcacccaccacc

SEQ ID NO: 582 - DNA, 84 bp, Homo sapiens; identical to SEQ ID NO: 581

SEQ ID NO: 583 - DNA, 490 bp, Homo sapiens
cttcataaagctcttgcgctaattccaaagagaaaaagagtaattttacagtggagaaatctggccaataccaccttaactaagtgatcaagttaacaccagcagtaaaatgttctattctgcatgttgacatcatgtacacccatgtatgatgtactgaggagggtacaccatcactcctgggacattcctgccaaaaatgcatatcctcagtctgatcatgaagaaacattaggcaaaccccagttcgggacagcatgcaagataattggcctatactcttccaaagtaccaaggtcaagaaagacaaagactgaggagctgtcccaggttaaaggagaccaagagagacaactactaaatgcagtggatttagttccaggattgaattcctcccttcccctcccctcccctctcttttttcctttccttttcccttttctttccttacagggtcttgctctgttgccagactggactgcagtggtgt

SEQ ID NO: 584 - DNA, 490 bp, Homo sapiens
cttcataaagctcttgcgctaattccaaagagaaaaagagtaattttacagtggagaaatctggccaataccaccttaactaagtgatcaagttaacaccagcagtaaaatgttctattctgcatgttgacatcatgtacacccatgtatgatgtactgaggagggtacaccatcactcctgggacattcctgccaaaaatgcatatcctcagtctgatcatgaagaaacattaggcaaaccccagttcgggacagcatgcaagataattggcctatactcttccaaagtaccaaggtcaagaaagacaaagactgaggagctgtcccaggttaaaggagaccaagagagacaaccactaaatgcagtggatttagttccaggattgaattcctcccttcccctcccctcccctctcttttttcctttccttttcccttttctttccttacagggtcttgctctgttgccagactggactgcagtggtgt

SEQ ID NO: 585 - DNA, 490 bp, Homo sapiens; identical to SEQ ID NO: 584

SEQ ID NO: 586 - DNA, 363 bp, Homo sapiens
gagtgggtatgtggagtgacctggaaagggagaagcgatatgaatgttgcactactcagcctgcatgatggggtcaagacactttctgctggaggttgacatttgttttagtagtttatgttgatgcaaagatcctgggaaacatgcatgattttgagccttttcacaaggaagggtgatgttaaaagtgagctaacttgagaaactggcttcaaaatctgggccaatttgagcaacaaaataaataatggtagaagggtattgtaacccagagaataaaataaatatccacaagtccttaatgatgatataaatacataagtggggagaagggaaaacttttgtacagaggattccattagt

SEQ ID NO: 587 - DNA, 363 bp, Homo sapiens; identical to SEQ ID NO: 586

SEQ ID NO: 588 - DNA, 363 bp, Homo sapiens; identical to SEQ ID NO: 586

SEQ ID NO: 589 - DNA, 352 bp, Homo sapiens
catctttgtcaatcaggttagtgacaagtggcatcccctctttgcatgtgactcctagcaaggaacacctttttgaatgctgcttggccattcctatttcgtattagagttgagaaagctcatcagcctctgtgtggagagactcgaagttaagaccctcgtgaggaaaaaggaagaccagacagaagggtataaccagaggctgcaggctgggctgccctggcgatagctggaggagagcttcatgtaggagttgggggtggggtgcaggacttgctcaggggtactttgagctccttgtttccctgtagagtggaggccaggaatcatttaggccagggaatagtagtgt

SEQ ID NO: 590 - DNA, 512 bp, Homo sapiens
atttttatagtgtcactgaggctgagttatggaataacaccttctctttggcccacgttatgtcatttgaactcctaccactctgtgaaatagcctcccctcataaattggacaaacagaatggctgatttgctcactgttaaaactgtgactggtttggtttctttgaatcccaagtgcagtaggcaggagtgaatcatagactcttagagttggaagggatcttagacatcatcaaatcaaacttctctacaatgtctctgaaaagcaaacatccacactgcttgaacacttccagtgacaagaaactcactatcttacaaagcatccacagggtcaaagcaatgttctatttatcaagctgagaactatctcatcttaagtgtcactcactagtctgatcctagaacacatgagagcctttcatatatccttaagatcacattggtttgattgttcctaggactagggacagtgccagggaattgctgctgtgaacctaaagtctaatc

SEQ ID NO: 591 - DNA, 512 bp, Homo sapiens
atttttatagtgtcactgaggctgagttatggaataacaccttctctttggcccacgttatgtcatttgaactcctaccactctgtgaaatagcctcccctcataaattggacaaacagaatggctgatttgctcactgttaaaactgtgactggtttggtttctttgaatcccaagtgcagtaggcaggagtgaatcatagactcttagagttggaagggatcttagacatcatcaaatcaaacttctctacaatgtctctgaaaagcaaacatccacactgcttgaacacttccagtgacaagaaactcactatcttacaaagcatccacagggtcaaagcagtgttctatttatcaagctgagaactatctcatcctaagtgtcactcactagtctgatcctagaacacatgagagcctttcatatatccttaagatcacattggtttgattgttcctaggactagggacagtgccagggaattgctgctgtgaacctaaagtctaatc

SEQ ID NO: 592 - DNA, 366 bp, Homo sapiens
actactgcctataacaggaaaaacaatggtgtcttggcttcacctggcacctttcccacatagggttccagtctcaggctgttacctgactcaggctgtgcattctacctgcagggacttatttccagcctctaggtgagccaactcaggctcagagaggcaaagtaccttgctttaggcaggaatgggtacagttaggtctaggacttgcagacaaataagccaactccctggctctttaacttcttaattcgtttggctattcatacccctgttctcctttccactctgccccacaacccttcttctagtttgccctctctgccctagggaggcctcttgtatagatgagaaatgctgagcatt

SEQ ID NO: 593 - DNA, 252 bp, Homo sapiens
attactgccacatttgagaagtgaagcacatgaaagctgtggtcaaatttgagaagaggctatttacctttgcagtatggttttcctgaatgtctaaatatatctttacttgatcagtcaagtggaagttggaaaattctaatactatgctgaactccctagttagcaacaacctttataccagagttggggcgggaaacaactgtattccttgaatcatgatagaatgttgtcaccaaattgttacttcta

SEQ ID NO: 594 - DNA, 252 bp, Homo sapiens
attactgccacatttgacaagtgaagcacatgaaagctgtggtcaaatttgagaagaggctatttacctttgcagtatggttttcctgaatgtctaaatatatctttacttgatcagtcaagtggaagttggaaaattctaatactatgctgaactccctagttagcaacaacctttataccagagttggggcgggaaacaactgtattccttgaatcatgatagaatgttgtcaccaaattgttacttcta

SEQ ID NO: 595 - DNA, 366 bp, Homo sapiens
actactgcctataacaggaaaaacaatagtgtcttggcttcacctggcacctttcccacatagggttccagtctcaggctgttacctgactcaggctgtgcattctacctgcagggacttatttccagcctctaggtgagccaactcaggctcagagaggcaaagtaccttgctttaggcaggaatgggtacagttaggtctaggacttgcagacaaataagccaactccctggctctttaacttcttaattcgtttggctattcatacccctgttctcctttccactctgccccacaacccttcttctagtttgccctctctgccctagggaggcctcttgtatagatgagaaatgctgagcatt

SEQ ID NO: 596 - DNA, 599 bp, Homo sapiens
caacagctctagcctgatgaacacgcaggcgccgccctacagcatggcgcccgccatggtgaacagctcggcaggtaaccttggcagctctgcgctcctgagcccctctctctcccctctcctcctcttaggctccaccagtgaatctgcctaaacggcccgagaaggtggatcagttggcgaaagtgggaatcatactacttttctgcttctcagaaacttgctccatctatttaagacttgagaattacattatattttatgtaaattatttttattcaatctgtgtttgtataacaagtggacatatttcaagtattattggagattgttaaatatgcacactaagttctctttctctttgggaattattagtattggaagatcctcaaattctctccatttggtagtggtggagacaaacatttcgaattcacatttcaggggaaatcgctggaagggcagagcaaggggggtttgaagtactttttacatttagggaaacacctctaaatgtatgctcggaagtagctgcttcataaatgctctgtgcagattgtctctattgggaaactgttttaaatgtttcatgatgttta

SEQ ID NO: 597 - DNA, 107 bp, Homo sapiens
ctctttacgtaagaagagcttgactacaatggtggactcttttgacgcttttgccaccttgctatcatttctgtttttagggcaatctctacaccactgtgcagtta

SEQ ID NO: 598 - DNA, 373 bp, Homo sapiens
agacaatgagtaccactttttacataaagtgatgtgtatttccagcgacctgttactctctgtcacatgttaaaatggatctcacgggaggattccctccttcagagactgcagggcgtggcttagccagtgtgtatcccgtgatgccccgtgatgcgttaggaatgcatgggacagccagatccttggttctttctgattacattttttcatttcttctgccttccacctcctttctggcctctctgtctttgaaagttcatgtccctgtgtccggcggaacagccagtgagaggctgggctcgcctcctgtctgagcttctgcgtcgttgatttctaggacctaattgaagggtgacattccatgataatt

SEQ ID NO: 599 - DNA, 1429 bp, Homo sapiens
gtagagatggggtttcaccatgttggccagcctggtctcaaactcctgacctcaggtgatccacctgccttggcctcccaaagtgctgggattacaggcatgagccaccgcacctggccccatttaatttatataataaaacaagtgcaggctttacctgattttattctcaccttctgttttcttcttctgcattatctgtcaccatgggttggctcctccccactttctcttttttattcttttctctcttttttgccacactaaattgtaatgtgtttgaacaactctgacttaatattacctctaacaaaaagctggaaactgcacaaatattctttgtaggctctaaaagtaggttggctgaagtatgatacctgaactaattattcatttgtatgcttgttttataagtttgacttccatttcatgatttttttggtagctttatgttatttctgttttcagcaatgggtactttgacatctttctgtctctgaattgaattttcattttgcaacggaagagaagacaacatatttattccataatgaaagagctaatgaagtagaataactattaaattgagatgttttagcaaaaaaacaaaaacacaaaccccaaacgggttgttttgttttatttttttctaaaacatttctaacaattcccagtaggaatgggtggggccagccttcctcatttacaatccagctgcagtgagtcaagatcctagcttattctcccaattgtgtaataaatgcagaaaaatgatgtgacggtcactattctcaaatccattgcattgtattccacaaaggatatcctggcggaaggtggaaatatgggagggtaccatgatgtaaagaattgcctggaaatttccttgagtcatgcattttgtaaaaccttacattactgctatgagttaataagagacaggttaaaccactcccctcaggatagtaagactggttaaaaacactgctctcagcccacacagttatagctacagcctaggttaaatgattcctcatcctggtgtttttattctcatgtttaattacttctttaaagattaagattatatatagaaaaaataattgtggtatcagagaatacaggtataatttttcatatatcaggactatgtgatgatacttaagcaatagtgtacatacagtaatatatgtttaatatcgagtatggataatgaaggacttttctttttcaccttgtttataatgacattttatccagggtttgaatcaaataaattcatgttaactgtactattttattgaaatgttctagtcttattattggataattagaaataaacattttaaagtctttatgaataaataaggatgttttcctatgtatacaactgtactattttcattagtaataaacatcactttcaaga

SEQ ID NO: 600 - DNA, 1229 bp, Homo sapiens
atatacactatccttttttatgggttatggataaaggggaatttatttgataaatagggctccattttcaccattgcaatggtttaagggtgtttgttcacgtttatgtggcctgaagtcccatttttatcactattattatttgagatggagtctcgctctgtcacccaggctggagtgcaatggggcgatctcagctcctggcaacctctgcctcctgggttcaagcgattctcgtgcttcagcttcctgagtagctggggttacagacacccaccaccatgcccagctaatttttatatttttagtagagatggggtttcaccgtcaccatgttggccagcctggtctcaaactcctgacctcaggtgatccacctgccttggcctcccaaagtgctgggattacaggcatgagccaccgcacctggccccatttaatttatataataaaacaagtgcaggctttacctgattttattctcaccttctgttttcttcttctgcattatctgtcaccatgggttggctcctccccactttctcttttttattcttttctctcttttttgccacactaaattgtaatgtgtttgaacaactctgacttaatattacctctaacaaaaagctggaaactgcacaaatattctttgtaggctctaaaagtaggttggctgaagtatgatacctgaactaattattcatttgtatgcttgttttataagtttgacttccatttcatgatttttttggtagctttatgttatttctgttttcagcaatgggtactttgacatctttctgtctctgaattgaattttcattttgcaacggaagagaagacaacatatttattccataatgaaagagctaatgaagtagaataactattaaattgagatgttttagcaaaaaaacaaaaacacaaaccccaaacgggttgttttgttttatttttttctaaaacatttctaacaattcccagtaggaatgggtggggccagccttcctcatttacaatccagctgcagtgagtcaagatcctagcttattctcccaattgtgtaataaatgcagaaaaatgatgtgacggtcacaattctcaaatccattgcattgtattccacaaaggatatcctggcggaaggtggaaatatgggagggtaccatgatgtaaagaattgcctggaaatttccttgagtcatgcattttgtaaaaccttacat

SEQ ID NO: 601 - DNA, 11639 bp, Homo sapiens
gcgccaacccgctagcgcctgaatccggcgtgctgcccgctcgccgcccgccatggcccgcgcagccccgctgctcgccgcgttgaccgcgctcctcgccgccgccgctgctggcggagatgccccgccgggcaaaatcggtgcgggaaggacgcggtggggttcccagctggggagggccggcgggtaaagggttctcagttctcagctaggtggggtataggagggcggctgggtgagggaggggtcctcggaaaaggagctgggtggaggagaggcgccgaaggggacgcggcagggaaggtcctgatggggccggggcatggcatgtgaagagggccacctaggacggaaaagaggcctgggcaggactggccgcggatctcaccgggaggtccagggtcgctgagcatctgccatggtcctggctgttggctaggcgcccgggtgacagaggacagagaggctgggcgatggcattcacagaggttggttgagggctctctgtgtagcagacgtggtgctgtagttcctgctggggtagagccctcacagtacagggaagtccgtgctgagctgaggaagtacggtgcatgcagaggaggggcgcttcaccctgtctttgcggccctgggagggcttcctggaagtaacatctaagccaaaccacccccaggtcgataggagacagtcctggcagagacagaacactaggtccgctggagatttgctgacagaacggggaacttttaacaacagtctttttgtttattgtgtgtgtggtttccccaatactttattttgaaaatgttcagatgtacagcaagaattttatagtggtcatctgtatacccaccacctacattctgccattaactgctgctatacttgctgtgtcacataactatcacgcactgttctagacatccacgaatccagcctacattttgatgcatctccaaataaattgcagacatcaggacacctcactaaatacgtcatcgtgcatatcattgactagagtgtcatatgtgtttacagttgcttttttttttcctccctcaacaactgtcattttaactacatgactcgtgaagattttcaagtccctcacacgtgatattcccacaggcagagatcctgggcttcggggtgggaggacaaagactctattccgctaggccactctccatgcaccccagttggcaggagtgcctggaacatctgatagaagcatcacaaacttacagggtccagtgcagtgctaaagcttcttgtgtagcagaaccacagcccaggccatacagggttaagaagactgaagcatgccagaaaccagtttgagactgagagtttagtgcttgccaagaaaagagaatcctgaggctagagtagccagagaagccctcatggagaaggtggagtttgagccaggcattgaaggatgtggaagagttaggcaggcagtatccatgagtgaccatgtgttctctctctgtccttagatcgtttgaatacagtgtggctaggagtaagcagagtgtgctgtgggaatatgcagggcactccccgttttcttaggaacaggcaacaggacaggacatttctcaccattggggaaggagcaggacctccacccagcagaattgctgcattgtggcaacatggagctctctgcctccttcctcccagctggcccttctggccccatccaagagtcatccagagcaggacacttggcaatgcctcactgcccttcagctttctagattttcctcagccctctgacgggagcctctgttcatccttggtggtttggactctacccacaacaagaatgcggattcctgttaggatggcttaatgcttgtgcttctgcaggaccaaatctgagaacccccaagtggcatcaggaccctctaaacccacccatatagttccatatgctgcccttctcatgctggtctctttgcagagtgtgcgtgtcctctcactgacaaagctgattgtcctccagcatcttgcatgaaatcttatttccccaagaaggctgtgtccccacaccctctggggcagaattcactgcttccccttcaggactccctggaaccctgttgcacttcatcatgggttgtcgttgctaattgcgcaggagtctgtctgcccattccatgctggggtcctgggggacagaagcctgtttgatttttctttgtgccccaggacatcttactgtaaattagagaattggtgtcagttgtgttaaatgagctggttcacaatgaagtggtgtcttctgcttcctgatcttgggcagcttctaggccttaatatcaatttctctggaaaaatgggtaatttgggactctttgcacatggaggggatgggagcacactggttaaaataaaatccaaagctgtcttggaagtggctttgtaagtactgtgagaggaagtggtttattctttcaacacagaaaaaatacttcatgaactctactgtccaccaggatctggggacatagtgatcatgcactctctctctgtccttaaataacttgactacagtacggctaagcagagtgtgctgtgggaatatgcaggaggaacacctgactcacctcaggtgggtcagtcaagccaagttataggtgacatctgagggctgttgaagccagtgagacacagggtgatggcactcctatcaaagggaacagctcggacaaaggcccaggcatgagagaacaaagctatgtgcccacaataagagaagcctagacagacaagaaggtggcatcttgggagggtaaagcaggaaatggaataagtaagcagaggccagatcatagagaacctggtgctgtctgaggattgcctgtgacttctggcaggaactggtactctgtgggtccaaatgggtccagtaaggacaaattacaccagatttatttaattttcttttggggtaaggcctctggactgtctgatgagaagagagtggtgtttcagatacatggtgagcaaaaattataggtagggtggtagtccagttcagtagcttcatagctggtttatagttctctcacaggactgtttaatgattagtgtcaggtgaggcacagtggctaatgcctgtaattccagcacttggggaggccaaggcaggaggatcacttgagctcaggagttcaagaccagcctgggcaacatggtgaaacctcatctctacgaaaaatatgtcgggcatggtggcatgtgcctgtagtctcagctacttgggagcctgggaggtttgcagtgagccaatatcatgccactgcactccagcctgggcaacagagccagatcctgtttgaaaaaaaactgattgatgtctgtccaggcagtggtttcctagcagcacctccaagccctgtcccaggaaacattcttatcagtgacttcgatgagaatagtgatggcatgtaaaccaagtttacaaataacaggaaggcaggaggtacagtaaagacagtgtatgataagacccaaaaaagctgaaactttgtaacaagatttcaaactggaatatagtgtcctgtagggtaatgaacaatccatcatagagtacattccagtctcttttttttgagatggagttttgctcttgtttcccaggctggagtgcaatggcacgatctcagctcaccacaacctccgcctcccaggttcaagcgattctcctgcctcagcctcctgagtagctgggattgcaggcatgcgccaccacacccagctaattttgtatttttagtagagacagggtttcaccatgtttgtcaggctggtctcgaactcctgacttcaggtgatctgcccccgctaggcctcccaaagtgttgtgattacaggcgtgagccaccgcgcctggcagatacattccagtcttgacaaacacagacataaggatgatttaggtgtccgatagtaggttggactagaccaggagttggcatacttttttctgtaaatggccagagagtaaatattttaggcttttcaggccatgcagtctctgttgcagctactcaactctgcctaaaatgaaaacagtcatagacaataattgaaagaaagagcatcatggctgtgtttcaataaaactctagtttgcaaaaacaggcatctttctggatttggcctgcaggctgtagtttgccaatccctggattaaggcctggtttccaaacactgatcactgaacagaactggtcagtaacttttaacaattcatagggaaataagaaagttagaagcaaggtagtgagttttatataaaactaaatttattctctttaattggtcatcctgactttcagtattctttgctggtcttttgctgcaaaatacctttttctttatgaaacgaaagtatagtaggcagcagttttcaggtttgcctttgcttattaatagctctactgacaactcagtccgcagatttccttttggaaatgttataagcctaggaaatttaagcacctgggaaccaccagcgcaggaggatacaaagtgtgaactacagcctctcactctcatgttctgtctctcttcttccctacctcccgggcctgctgacagcggtggttggggctgggattgggggctctgctgtggcccattttctccagcagcactttggacctcgggtgcagatcgacgtgtacgagaagggaaccgtgggtggccgcttggccaccatctcagtcaacaagcagcactatgagagcggggctgcctccttccactccctgagcctgcacatgcaggacttcgtcaagctgctgggtgagtggtcagtcctggggctccagtgcccagcgccctggggctggtgacagcactgggcccttctcagacttcccagaccatcaaggccagaaggtcatgtggcccaatctcattttacagatggagcaacagaaacaagagaggggaaggaacttgcctgaggttacacagtgagttagttgcagagccgggattagaactcaggtttgactcctaggccagtttctttccctttcaatttgctgcctctaaataatcgtgattatatcaccttccacatgctagtgcttgccaggcaccttctgggtggtatgtaggcattacctcagctcccctctaccaacctgcaagatgagtgttatatctcctcttaaggcaactgaggctcagaaaatgtatagatttaagctaaagccattacagcgagaggtgggattcaaacccagcagcatctgtccaatacacgttctgtttgatgcagaaactctgcttctcagaagtgatgctacaggtggtcttacagatgtgcaaagtagcatagataccaagttattcactacagcattgtttgtaatagcaaaaggctgaaagtatcctagctgcctatccactaggacctggggttaaacaaattattgtataactacacaataggctgttcagcagtcagaatggggaagtctttatgcccagatacagggcaatctccaagatacagtgtattgttaaagtggagagcagtgtgtgtagtatgtgggggtggggaaggaacaagtcatagcagctctgtctgtgtttaggagtccactgctctgtcaagttgcagagtgcaggatggctgtaaggagctaggataacttccaagtgatctcagtgcccaaggccaccatctccaaacaagcccagtggctgtcaccccctggacattctgggataaaatctgaatttccctcacttgtggatcctcctggggaaaaaaaatgtaaaatgttacattattttcattttcatttttttattgacttggtagtccaaacattttcccagtgcatctgtttactgtttattaacaagcagcacaaatgaacaaaccatagcatttgtgtttcctttaatggaccagtccatttgcatcaagagggccccaagtcttggaggggacctgaggggctcctctttgtctctgcagggctgaggcaccggcgcgaggtggtgggcaggagcgccatcttcggcggggagcacttcatgctggaggagactgactggtacctgctgaacctcttccgcctctggtggcactatggcatcagcttcctgaggctgcagatgtgggtggaggaggtcatggagaagttcatgaggtagggctggcagagctgtggggatggcgttccaggggaaccgagaagaggtgggggaggaaccagcttgcctgtactttgtgaaaaaggaaaaggtccttgctgaattgagccagcacaattcagtgcaggctcagagcaagcccctggcatgaggaatggccgtatttggtccagtaatggtctccctagtattgtcacattgactctcattttcttaccctctactacactgatactaataaaagcatgggttgcaaactcagtcgcttaacaagggctgaactgggatgcgagtcagtgaatcagcaggtggaagagagcagaacaaggccccctctgaaggaggcagccagccctccaccgcagccatctgcagccagccgtgtacaatgcccacctcatgtggctagatctactcacttttcagaagaagctggaaatccagagtcgtgtgtgaaatcttttcagtttttcaacatttgcaaccaattcatcttgtaagccaaatgaaacacttctgcagggcagatgcagcctgtggaccactcatttgcaaactttgttgtcctcatttttccatctagaataaacacctttcttcaccactcctcctatccctgggctccagccccctccccatcacctttggtcccagatgtggagggcaagtggtctgttccctccctgttcaccaagctgtcactccacctttccccaaagtccctcctgaaggtgctccctgcttccagcctaaggcgcaggggctgctccccggaccccatcactgtctgcctcccttcagtgtcactcaagtgtggcctgtgccctcctgccctggttcctggcacttctccactcccttcccattctataactctgctgtttatagcacttcttccttatattctccagatgtcacccaaagcttatttccttacctctctttctgatatttttctcccttatcaattatatccagaccaataatgttgacttctacgttttatgggaaatgacttctccctctcagccctagtttcctcttcacttccagacccacatttcaactttctggacacctccatctcgtgtcctattgataaccaaactcaacatgtttacaaaagaagccctagaatgggcaacatttcaaaggccagccagtcaggaaatccatcgatggttccaatccatgctagtgagattgcatgagtgatagagcgacaggacatgagcctgggggtgagtgggagccctgtcagatgaagcgagaggagaggacaggctggactggcagagaaggtgacagtatcagcatgaagttgcagtgtgtcatcaggtcctagaagctgtggcagaaccgacactgttggagaaggagatgtgtcagcaggggtgggccgtagccccagctgggtgaagaaagggttatgaactatgacctcaggcagggagtggctcagagcagtgatacagttgttactcagcacagccgtgatgtgaagccaggcctagaaggattccataccttcacactccctttaggtgggacaggcccgccacagtcagagaacaggtgccagggaacatgaccagcctcttctgccaccactccatgtagaggaagtgatgggttcctggtgggcctcccaggcactataacccaggggcaggtggtcaggcaaaaagccttcctgcacaaggactccagctctatgtgtcttctaggatctataagtaccaggcccacggctatgccttctcgggtgtggaggagctgctctactcactgggggagtccacctttgttaacatgacccagcactctgtggctgagtccctgctgcaggtgggcgtcacgcagcgctttattgatgatgtcgtttctgctgtcctgcgggccagctatggccagtcagcagcgatgcccgcctttgcaggtaagcgtccaacccttggcctgcccacctgcccctcctccacccaaggtgctcagaatgggctgggggtccccataataacctcacttttatccagctcattgcagtcacataggcactctgctgccccatcctgcctgattctgggactggccatgagttggcaggagatagtatcaccccacttcacagacagtgaaagcaaggctcagatcacaggtccagtgtgtttctaccactcccaattgcttcataatcccttgcatgtgtgtaaatgttagagctgagataatgctctgctctctacactttggtttcaagaactgccctgttgaggcctttgagccactgtgagagcacctcctcttcccagctcttcacgggagtggctgggcctgtgtgtagctcactgtctgctagcacagaccacaggagtggagaatgtaggcttcacaagagcaggaatccttgtctattgttccctgatacattgcaaacacagaacagtgcctaagtcatactaggcactgggtatatttttgttaaataaatgaatgcaaaggtttacaataacaagcacctccctcgtaccctcgatactgttcatctggctctgcacatgctggctccttcgcagccttcaggccctgcctcagtgtcccctcagtgttccttgctcactctttcagtatcttgtgtgtctccttcatagcatttttgtgtagagatatatagaattcacataccatataattcgcccatttaaattgcacaattcagtggtttttagcacattcggagttctaaaaccatcaccacaatcaattttaggacatttttatcaccccagaaagaaacccccttgccctttagccctcacctccccaacaccccccggcctcccagccctgggcagctacagatctgctttctgtttctgtggatttgcctagtctgggcattctgcataaatagacctcacaatatgtggtctctgggagctggctctttcgttgagcacagtgtcttccccccatagcattgtgcactttgttgtacttacttgtatgtttgccatctccccatgcccatggttgggagagttttgctctggcagggaggcccagtcgaatagtactggactccccagccctcctgccccacggccctgacaacctatcagcacccacttcccgctttgcccaggagccatgtcactagccggggcccaaggcagcctgtggtctgtggaaggaggcaataagctggtttgttccggtttgctgaagctcaccaaggccaatgtgatccatgccacagtgacctctgtgaccctgcacagcacaggtgagtagacagggcgggagtgggcaggcatgccattcccagccagtggacagacacttctgcctcctttgtacctcagccctggtctgtgatccccctggggagtatttccgaaaaagcattgagaagccccaaccctgccaggtgacactagagggtgctgtttccccaattcagatgtcagccagaaagctgagacttccatcgacccagccttttctgttgaccgatgaggactttgaatgacatccttgcccacgctcccccaactggccagcggcggaagcagagcagaaactgagtctcctgactccatgccccttgcttcttctgcagccgcatcagcatggagaggccaggacccaccatttagacagccctgctgcaccctgagcaccagggtctcgttgtacctcaatgctggaccccagtagggagttcagtgggtagaagccaagggaaagttgacttttgtgctcttttctttccagaggggaaagccctgtaccaggtggcgtatgagaatgaggtaggcaacagctctgacttctatgacatcgtggtcatcgccacccccctgcacctggacaacagcagcagcaacttaacctttgcaggcttccacccgcccattgatgacgtgcagggctctttccagcccaccgtcgtctccttggtccacggctacctcaactcgtcctacttcggtttcccagaccctaagcttttcccctttgccaacatccttaccacagatttccccagcttcttctgcactctggacaacatctgccctgtcaacatctctgccagcttccggcgaaagcagccccaggaggcagctgtttggcgagtccagtcccccaagcccctctttcggacccagctaaagaccctgttccgttcctattactcagtgcagacagctgagtggcaggcccatcccctctatggctcccgccccacgctcccgaggtttgcactccatgaccagctcttctacctcaatgccctggagtgggcggccagctccgtggaggtgatggccgtggctgccaagaatgtggccttgctggcttacaaccgctggtaccaggacctagacaagattgatcaaaaagatttgatgcacaaggtcaagactgaactgtgagggctctagggagagcctgggaactttcatcccccactgaagatggatcatcccacagcagcccaggactgaataagccatgctcgcccaccaggcttctttctgacccctcatgtatcaagcatctccaggtgacctactgtctgcctatattaagggtccacacggcggctgctgcttttttttaagggggaaagtaagaaaagagaaggaaatccaagccagtatatttgttttatttattttttttaagaagaaaaaagttcatcttcacaaggtgcttcagacttggtttcttagctagaaaccagaagactacgggagggaatataaggcagagaactatgagtcttattttattactgtttttcactacctactcccacaatggacaatcaattgaggcaacctacaagaaaacatttacaaccagatggttacaaataaagtagaagggaagatcagaaaacctaagaaatgatcatagctcctggttactgtggacttgatggatttgaagtacctagttcagaactccctagtcaccatctccaagcctgtcaacatcactgcatattggaggagatgactgtggtaggacccaaggaagagatgtgtgcctgaatagtcgtcaccatatctccaagcttcctggcaaccagtgggaaaagaaacatgcgaggctgtaggaagagggaagctcttccttggcacctagaggaattagccattctcttccttatgcaaagattgaggaatgcaacaatataaagaagagaagtccccagatggtagagagcagtcatatcttacccctagatgttcatcccagcagaagaaagaagaaggtgttggggtaggattcttcagaggttagcctggtactttctcatcagacactagcttgaagtaagaggagaattatgcttttctttgctttttctacaaacccttaaaaatcacttgttttaaaaagaaagtaaaagcccttttcattccttt

SEQ ID NO: 602 - DNA, 422 bp, Homo sapiens
catagtgcaatggtatgatcttggctcactgcagtcttcgcctcctgggttcaagcaattcttgtgcctcagcctcccaagtagccgggattacaggcacctgccaccatgcctggctagttttttgtattttttgtagagatggggtttcgccatgttggctgggctggtctcaaactcctagcccaggtggtccacccgccttggcctcccaaagtgctgggattatagatgtgagccaccgcccccagccaagtaagaaggcttttgatgaagtggtaggaaaccaaattcaaattgacttaagcaataaaaagtttttattagttatcatggctttaaagtccaggcatagagcactgtgcagtcttacagttccatgatttctctcatagtcaaagatggctgccaacagctcccag

SEQ ID NO: 603 - DNA, 624 bp, Homo sapiens
agagacggggtctcagagtctcattatgttgcccaggctggtctcaaactgctggcctaagcgatcctcccgcctgaccttccaaaatgctgggattacaggcttgagccacccccagcctccggattttctttattctgaaactcatccctaactttattttctgccagaggaagtctgtttttcacagcgtgataaactagcaagtctgagctgctgctcttgtcttcttagaggatgaaaatgggagtttatccctccttttctcctttctgaaaagagagtagatgaaaccttcccccgccttttggtttttaggaagcagaaagcagagatattaactatataaaaactgcaaacacataaataacagcagtatagaaagcatagggcttgtgtcagcatatgaatgaggtagcgtcttaccaccctggccgcatgcttggtcagcaatttccagcacttgcagacactgcaaaaggcttcccttatctcataagatggttacaaccacctagaaaggtggagcaggattcttcgtctgtgttataatagaggaaacagacacagagaagatacagagctaataacgcagaggctggacataaccgaggtcttcaaagc

SEQ ID NO: 604 - DNA, 683 bp, Homo sapiens
gctgctttgtaattagtttcaattttaaaaagatccatgttttcctgaatagaaaatatctttcgaaatgaatagaaaacatgacattattaggaattcaattctggtgttttccaatacattaagttttgcctttatattttatgtaacaaagtaatagctttacaaaacactctaggtaattttaagatcacatactatctattgtatctggaatttgcagagtaatgaggatgcccttgaaatggcttcatacctctccgatttgctggaatattttaatatttttcttctaatctgtttcttgagaggcactatgacctgggttgaaagcgtggctggatgtttccatttccagcgatttgattttgggcaagtggcttaacttgtggggatttcgatttcattatctttaacctgagggtctgaggctaaatggtttctaaggtttctttcaattctaaaaatctgtttccaaaaaataattcctcagttttccaagtggcataactcacccttatctatactaaagaaataatacatgacagtagattcatagctcatggcaatatggctttctaatctattgaagaacattatgtggctgaagaccttcagaaaatttgtgtcctttcatgatattgtagaattgtttatttgtgttttcttttttgagaagaaca

SEQ ID NO: 605 - DNA, 304 bp, Homo sapiens
ttttatcttaattcttttttttgagacggagtctcgctctttcgcccaggctggagtgcagcggcgcgatctcggcttactgcaaactctgcctcctgggttcatgccattctcctgcctcagcctcccgagtagctgggactacaggtgcctgccaccacgcctggctatttttttgtatttttagtagagacggggtttcaccgtgttatccaggatggtctggatctcctgacctcgtgatccacccgcctcagcctcccaaagtactgggattacaggccgtgagccaccatgcccggcc

SEQ ID NO: 606 - DNA, 279 bp, Homo sapiens
ttttttttttttttttgagacagagtcttgctctgttgcccacgctggagtgcagtggcacgatctcggctcactgcaagctctgcctcccaggttcacgccattttcctgcctcagcctcccgagtagctggactacaggcaactgccaccacgcccaactaattttttgtatttttagtagagatggagtttcaccgttttagccaggatggtctcgatctcctgacctcgtgatccgcctgcctcagcctctcaaagtgctgggattacaggcatg

SEQ ID NO: 607 - DNA, 892 bp, Homo sapiens
aagaattttaaaggaaggtgggtgccctaaaaatacatttatgccaactggattgaatcaccttgaatcacaatgagtacaacaactgctaatgagctaacacttaatgagtaatgaccaggcaccagacactgttctagcactttatacttactgatttctttactcttcatgataaccctatgaggaaagtgcttttttgttaagctccattttcagctgaagaagctgaggcctggagaagttacatagctttctcatggtgtctccactatgaagtagctgagctgagatctcacccaaggccctgctgggttcaggccacactcttaagtactcacagctgcatcacactgaatatcatctccctgcactgccatttcatttgagcagggctttgcctgtcaagaacattcatatcttttgataaacagtgcattttttccctgatagtctgtatgggacagcctccttgtttgcatctgaaggacagggacttcaggacctcctgctgtggtcaccaaggaatcacattcaaacttctcagcaaggtgttatggtccttctcagtttgcctacgatccattgaggcaaaggtttccttctctcaatacaccctctgctttagccagggggacctcccactgtcctctctatgtgttctatttgttcctgactgttagtacccgcttgtgtggtttccatgatccttcttctgcctggaatgaggctcctcttgagtcctgagagcttcatttctgtctgtcttttgggctgtgccaaagcccctctgccttcgtggactccccactgattcattaccaattttcctctcctctgggctcttcttagattgcaaatggtgcctctggattgggtaccaagacttgca

SEQ ID NO: 608 - DNA, 32134 bp, Homo sapiens
cgcacgagcctcaagatccaaggtgcgcgcgtcggcgtccgaggcggttggtgtcggagaatttgttaagcgggactccaggtgactctgggggaagcacgcgacgaaaagatgatgccggggtctcttctaacaccagaagggccctgatgatggctgcgcgcagctttcggagccggatgcgcgagggccccggaggcccggcggcctggcggccgggcgggcccagtttggggacaaggacggggctggccagggaggggctgggcctggcgggaaggcagcgctgccccggactcggcccgcgcggccctcccaggcccccgtgccctggatccaggcccgtgcgtcccgtcagtcccaggcgctgggaggcgtcatcaggaaatcattgggtttacattaatcggaatacttgttaaacgtttacccgtcagttgctgccggctgcttagtgcattagcttagaaagcagcagaaattctgcagttaagagccctgatttgtcccgagtttggaaaaccggccccaccgcctgcaggggcccacccacgtggctctcactgatggagaagaaggggagacctttaatggcactggaatcttagggtttggttttttttgttttgttttttgtttttgtgttttcacttgcaggaaaacttaaaatcaagttcaggcagccccatgccatcattattattaccaaggtagtttatgcccatctgtaaagaccaaaagaatattaataatgaccttctggccgggcgcggtggttcacacctgtaatcccagcactttgggaggccaaggcgggaggatcacttgagttcaggagttcgagaccaggctggttaacatggtgaaaccccatctctacataagagacaaaaattagccaggcatggtggcgagcgcctgtaatcccagctactcgggaggctaaggctggaggattgcttgagcccgggaggtgcaggctgcagtgagccgagattgtgtcattgcactccagcctgggtgacagagtgagactgtttcaaaaaagaataataacgactttctaaaaacatcagagtaatacatgaacaggatttaacaatcaaatggcaaagaaaggtttatatgaaaaggaattttcctgctttatcttttcccattcccagcctctttccctgaggtgactatacttaaccataataataataacctcttaatgcccccaatctctctttgatacaatttgattcttaaaatttcttcctattgcttcaccttattacaatgtcttagcaattcattataagtatttttctaaaagtcatggttattgtgtaatgtataaatgttatgaaactagcttggacatttttgtcatgaataatttctagctaatgttccttagctgtatttaatttaggcatctgtttttggtgaagtggttagaatttcgaatactgtgtttactggtcaacttcaagtgtaattatgatttcactttaggacatgtgggatttagaaaggagcattgaaaattatgaaattatgaattttttttggatgttaatccattgcaccaagcatgagctgtgcctagagatcagcggtataactttgttttgctttgtttcacaatttggtttaataagagtgatttcatttacctcaagtgctatttcttcataatgctgtgtaatgctaaagctttgattatgtgcgtgtgtggtttttttctccaataggcaattatttccagtcagagaaggaaaccagtgcctggcattctcaccatctttctacctaccatgatcaagtgcttgtcagttgaagtacaagccaaattgcgttctggtttggccataagctccttgggccaatgtgttgaggaacttgccctcaacagtattgatgctgaagcaaaatgtgtggctgtcagggtgaatatggaaaccttccaagttcaagtgatagacaatggatttgggatggggagtgatgatgtagagaaagtgggaaatcgttatttcaccagtaaatgccactcggtacaggacttggagaatccaaggttttatggtttccgaggagaggccttggcaaatattgctgacatggccagtgctgtggaaatttcgtccaagaaaaacaggacaatgaaaacttttgtgaaactgtttcagagtggaaaagccctgaaagcttgtgaagctgatgtgactagagcaagcgctgggactactgtaacagtgtataacctattttaccagcttcctgtaaggaggaaatgcatggaccctagactggagtttgagaaggttaggcagagaatagaagctctctcactcatgcacccttccatttctttctctttgagaaatgatgtttctggttccatggttcttcagctccctaaaaccaaagacgtatgttcccgattttgtcaaatttatggattgggaaagtcccaaaagctaagagaaataagttttaaatataaagagtttgagcttagtggctatatcagctctgaagcacattacaacaagaatatgcagtttttgtttgtgaacaaaagactagttttaaggacaaagctacataaactcattgactttttattaaggaaagaaagtattatatgcaagccaaagaatggtcccaccagtaggcaaatgaattcaagtcttcggcaccggtctaccccagaactctatggcatatatgtaattaatgtgcagtgccaattctgtgagtatgatgtgtgcatggagccagccaaaactctgattgaatttcagaactgggacactctcttgttttgcattcaggaaggagtgaaaatgtttttaaagcaagaaaaattatttgtggaattatcaggtgaggatattaaggaatttagtgaagataatggttttagtttatttgatgctactcttcagaagcgtgtgacttccgatgagaggagcaatttccaggaagcatgtaataatattttagattcctatgagatgtttaatttgcagtcaaaagctgtgaaaagaaaaactactgcagaaaacgtaaacacacagagttctagggattcagaagctaccagaaaaaatacaaatgatgcatttttgtacatttatgaatcaggtggtccaggccatagcaaaatgacagagccatctttacaaaacaaagacagctcttgctcagaatcaaagatgttagaacaagagacaattgtagcatcagaagctggagaaaatgagaaacataaaaaatctttcctggaacatagctctttagaaaatccgtgtggaaccagtttagaaatgtttttaagcccttttcagacaccatgtcactttgaggagagtgggcaggatctagaaatatggaaagaaagtactactgttaatggcatggctgccaacatcttgaaaaataatagaattcagaatcaaccaaagagatttaaagatgctactgaagtgggatgccagcctctgccttttgcaacaacattatggggagtacatagtgctcagacagagaaagagaaaaaaaaagaatctagcaattgtggaagaagaaatgtttttagttatgggcgagttaaattatgttccactggctttataactcatgtagtacaaaatgaaaaaactaaatcaactgaaacagaacattcatttaaaaattatgttagacctggtcccacacgtgcccaagaaacatttggaaatagaacacgtcattcagttgaaactccagacatcaaagatttagccagcactttaagtaaagaatctggtcaattgcccaacaaaaaaaattgcagaacgaatataagttatgggctagagaatgaacctacagcaacttatacaatgttttctgcttttcaggaaggtagcaaaaaatcacaaacagattgcatattatctgatacatccccctctttcccctggtatagacacgtttccaatgatagtaggaaaacagataaattaattggtttctccaaaccaatcgtccgtaagaagctaagcttgagttcacagctaggatctttagagaagtttaagaggcaatatgggaaggttgaaaatcctctggatacagaagtagaggaaagtaatggagtcactaccaatctcagtcttcaagttgaacctgacattctgctgaaggacaagaaccgcttagagaactctgatgtttgtaaaatcactactatggagcatagtgattcagatagtagttgtcaaccagcaagccacatccttaactcagagaagtttccattctccaaggatgaagattgtttagaacaacagatgcctagtttgagagaaagtcctatgaccctgaaggagttatctctctttaatagaaaacctttggaccttgagaagtcatctgaatcactagcctctaaattatccagactgaagggttccgaaagagaaactcaaacaatggggatgatgagtcgttttaatgaacttccaaattcagattccagtaggaaagacagcaagttgtgcagtgtgttaacacaagatttttgtatgttatttaacaacaagcatgaaaaaacagagaatggtgtcatcccaacatcagattctgccacacaggataattcctttaataaaaatagtaaaacacattctaacagcaatacaacagagaactgtgtgatatcagaaactcctttggtattgccctataataattctaaagttaccggtaaagattcagatgttcttatcagagcctcagaacaacagataggaagtcttgactctcccagtggaatgttaatgaatccggtagaagatgccacaggtgaccaaaatggaatttgttttcagagtgaggaatctaaagcaagagcttgttctgaaactgaagagtcaaacacgtgttgttcagattggcagcggcatttcgatgtagccctgggaagaatggtttatgtcaacaaaatgactggactcagcacattcattgccccaactgaggacattcaggctgcttgtactaaagacctgacaactgtggctgtggatgttgtacttgagaatggtaagtacgtagtattcatgtgcatgagatgcttttgaagatgggaatgctggacaaggagtaagatcctcattatccaaagagattatctcaacagatagaacattttgaagaccacttataaaacatatgttgtattttcatgctatatgaagatttgctacgtccaacactacttttttttttttttttttttgagacggagtcttgctctgtcacccaggctggagtgcagtggtgcgatctcagctcactgcaacctctgcccccctggttcaagcgattctcctgcctcagcctccagtgtagcttggattacaagagcatgccaccatgcccagctaaatttttttattttcagtagagacaggatttcactatgttggccaggctggtctcaaactcctagcctcaagtgatccacctgcctcggcctcccagagtgttgggattataggtgtgagcccgcacgcagcctctaggtccaacactatttaaatggagaagtacagtgaaaggatgtcagtgtgtgtatatgtgtctatgggtgtgtgtatgtgtaagaaagggggtgatgggtatatacctagagcaacaacaaaaggggtgagactgtccaattttaataaaaatgatactattaatagttgggaagatccacagtactttcctaccttgttttcccttcctgttaaatgcccagctttcctagaaatgtgtctttaaaggcacctgcagtgtcagcatggtattttactggaagtttctctgcgtggcttccaggttaagggccagaatgattctgtaatcatcctaggtttcccagtaaactctatggcttagtacagtactacatttatgagctttttctttctagaaagtaggacttgtccatgaattttcaaaatataggtcaagtatatactttcatgactatacttttcaaatgtactttattataatgcatatggtaaaatctccttgatgtgtttatggtacaagtagctgttattcaggaagacaataatatggcatttatttatttgagacagagtttcactcttgttgcccaggctggagtgtagtggcgtgatctcggctcactataacctccgcctcccaggttcaagggatcctcctgcctcagcctcccaagtagctgggattacaggcacccgctaccacacccggctaattttttgtgtttttgtagagacagggttttaccgtgttggccaggcttgtctcgatctcctgacctcaggtgatccacctgcctcggcctcccaaagtggtgggattataggcgtgagccactgcacccaaccaatatagcttttagatcgtaccacagggctacattagagcctgcactaggactctgggttctcggtccacatttaaagtgatattgctttggcagtgtgttgagagccagatgttgggaggtgataaagctgatttccatctggctataatcttggctttgcactaggaggataaacattacatctgtatccgtatttaaaattttgaatgctgcagaagaatggaacatgtataaatgtagttataagtcaatttctaatttctcctgacgatgaatatctctagcagaaagctgtggtttctttaaggttaaatgaaacctttacttttcagtgtttttctgtttttccttgtgaaaaaaaaatcactgtagtaacttcagtagtatttcatagtattttgtagtattcattaggagaaaactcatttctttcactgttgttcctgagactatcaagttgctcttaaagccactttatgtgcttttcaatctatgtggttttatgtcctgacttacactgaaggcttttcagaggtaaatctacagcactgacacctcatcttcctgaaatgcaactgcttctgatatggtgccaaaaaataactggattacattatactgtgagatggctgttgctaaaagaaagggggaaatcttagctgccatattcaacgtaaatatttcttccttttgaatatagacgtttaaaacactttaacctacttaacattctggattagcatacttttttatgaacttttgagggtcatgttaactgatagtttcctaatgaaaaatatttttggtatagaaagaagttccatgaacagatggctcctcagtaccctgctacctttctggaaatggctgatatacatcatgacatcaggacattgtcaaactttacataaaagtgttacatgaaataaattgttaaaagacaattttttttttttgagacggagtttcgctcttgttgcccaggctaaagtgaaatggtgcgatctcggctcactgcaacctccgccttctgagttcaagcgattctcctgcctcagcctcctgagtagctggaattacaggcatgcgccaccatgcctggctaattttgtatttttagtagagacgggatttctccatgttggtcaggctggtctcaaactcccaacctcaggtgatctgcccgcctcggcctcccaaagtgctgggattacaggcgtgagccaccagcctaaaagatacattttaatgtacagaaggaggatctataaaggtgattttgaggagtagtgtcaagtccccaagccttggtaattttttctttaaaatatattttatgcagttctttctattgtagttataaaccttatttcacttcattatcttaattttatcattcttaacctctccaggtttagtccaacagatttatctctcatgttttcctcctgttctaaagctgtcaaattcagcattgtttctaaaactcaaatctgattatccttcatggagaagaacagcatttgggccagatcttactagactctggagtttgaattgagaacctttcatttgtctacctgttcactttttcatgcagcatttgttgatcatccacactgtgctaggtgctgtcacgttgcaggttaactgactttgcttttaggagttcacagtactattagggaagatagctatctaaatataattgtattataatgagacaaatgttaggatagagacatacattggagataagagacataagttggagatttgtgaaggttgcaccaagttatggctgacaagtactgctgtatgtctaacacagggcttctctgggtaattttttgttgtaaggtttgtcctatgcattgtagaatatttagcagcatccgtggcctttatctgctagatgctagtagaacgtagaaccctttactcaagttgtgacaatgaaaagtgtctcaagccgggcacagtggctcacgcctgtaatcccaacactttgggaggccgaggcgggtggatcacaaggtcaagagtttgagaccagcccggccaatatggtgaaaccccatgtctactaaaaatacaaaaaaattagccgggtgtggtgacgcatgcctgtaatcccagctactcgggaggctgaggcaggagaattgcttgaacccgggaggcggaagttgcagtaagccgagatcacgccactgtactccagcccgggcgacagagcgagacgccgtctcaaaaaaaaaaaaaagggtctcaagacattgccaatgtcccctcgtgcaaaattgccccccagtgagaatcacagtgacctattctaggtcttcattctgtctggtatgaatagataatggaactaagcattaatatagagtcctatatggacagcataatttcattaaaggatttctgattctcaatctagtgtttagtagtctgctttatgtcttgactcagtttgtgcagaaagaggttttatgtgattaaatttttaaagagtttacttgtattttaagttcacatttctaggtttttctttcttatatttagggtctcagtacaggtgtcaaccttttagaagcgaccttgttcttcctttccttccgagagctcgagcagagaggactgtgatgagacaggataacagaggtaagggtggcagagagtgctggggcacacagtacacatcgtaccacctaactcaaaaaacaaagcaggcttgcattaagcttgatcagtgccagctgtgctgtactggaatcaggaattccccacggccctgtttaacagcggaactaattaattcagcgcatgcatttaggtcagaaattacttttccagacttgaggtcaatatttgctgattatgcatagtctgtggtgtcttgtgattaggggacatgtttcttatttttaaaaaggctggacttgcactccaagttgctgtagttttatgtaagcaaaactcttcaaaaaaagctacagacatcaattttgtgtgtatgtttaaaaatagataaggtatattttgcttaaaggcagtaaggctataaatttgagccatagcttctctgtcagtattccacaatatctcttttaacagtttggagaaaagctgtaatgccagaagatacagtcaccaactctagtttaaaaagtaacagatcaaaataatttagagatacagcaaacactgaacatttgtagaacatagaaacaatgtacgtgacctttggtcttgaggctatggctcaccaaacaggaaatgccattccctcctttccctgtggttctggatgccaactttacctgttcccttttgccctagatactgtggatgatactgttagtagcgaatcgcttcagtctttgttctcagaatgggacaatccagtatttgcccgttatccagaggtgggtctgtagcagtttttctttgccttttttttttcttcttcttcttcttattttttaaattttgagatggagttttgctcctgttgcccagactgaaatgcaatggcatgatctcggctcacgtaaccttcgcttcccaggttcaagcaattctcctgcctcagtctctcgagcagctgggattacaggcacctgccaccacgcccagcgaattttgtatttttagtagagatggggtttctccatattggtcaggctggtctctaactcccaacctcaggtgatctgcccgcctcagcctcccaaagtcctgggattacaggtgtgagccatcacgcccagcctttctttgcctgttattttaaactttgagtttcaagatgggtacagtggcatgcacttatagtctcagctactcaggaggctgaggtgggaggatcacttgaggccagaagttcaaggctatatagtgtgctgattgcacctgtgactagccactgcacactatagcctgggcaacacagtgagactccatctcttaaaaaataagtaaattagttaaaaataaaatttgaattttatttaagctgggtatgggcatgcaagactatattaatttgtaattatgattggaaactgggcatatttccaaattatgtatttggaaattactgtttaatgtagaggggagaaataaaatttatagcatttgggaactcaggcattttggattaaacatgtataatcaatgtgagaacagtgaatgtgtttaccactctcagaaaccctgacttgtagctttggcacagtattcagggtggtgataatgaaattgttatcattagataaagccacacatcttctactggaggaacagttcctcattggccccgcatggatgttctctcctcagtgtattttcacagaatgtactgtgcatgttataaacagggtgtataatagatgagcatttgtttaccagttctttcctcaagatatcatttgaggacttgatcatggaacatagacaaattgttgttgtgaaacaattttttttgttttgtcagtaattttgtttataagcaaaaatttttatgtaagactcattattcataaattcttttgaatttttttttttttttttttttttttttttttttttgtgacagagtcttgctgtgtcgcccaggctgaagtgcagtggcgtgatctcagctcactgcaagctccgcctcccgggttcacaccattctcctgcctcagtctcccaagtagctgggactaaaggcgcctgccgccacgcccagctaattttttgtattttttagtagagatggggtttcaccatgttagccaggatggtctcgatctcctgacctcgtgatctgcccgcctcagcctcccaaagtgctgagattacaggtgtgagccaccacgcccggccgattcttttgaatttctataaattccctgaattaaacccacctctagtaggctaaataaaaatgaatgcttttaaagcactctgatatctttggtaaaacaattctgacacaaaaattaaaatttcaattatattttgctgagtctttctaggttgctgttgatgtaagcagtggccaggctgagagcttagcagttaaaattcacaacatcttgtatccctatcgtttcaccaaaggaatgattcattcaatgcaggtaaaagattaacttcaaaatctcataaatatatatatatatatatatatatatatatatatatggcctaactcttctaaaatttgatttatttaatgatatagaccaccttggtcaaggcacgtgtgtgtgtgtgtgtgtgtgtgtgtgttcttactagaacttttatcatcagaagaaaaagcaagggattaattataattacaaagaaagaaatatctttagtagtgtaagtaggtttggagggaatgaattatggattcaggctgacagtttcaaggattctcaaggttctcctgcagaagattatatattgactttatatttggcaataatttataaatcaaagtcctttagtgaccttgtccttaagtgtgcaacagtgcccttttagaaattaccttctattgtgtgagcctacacaggtttgggaaagcccatattgagaagtcatttcacaaaagggaccctttgtctgatctgcttttctattttgccttgtgtttaccaccatggctgtcttattccctttgttttcagtacggaaacaaattaggaggctaacaaatttgggtaaactcctaacctggcattgacctggtaccagagcaggcaagcagttgatccagaaatagaccctggggcagtggtataggctcgggggtattggagagcctcaagtacctagacagagaggaaccaccaaggtctaaagccaccagtggcttttaacttacttctttaatagactagcagccgggcgcgctggctcacgcctgtaatcccagcactttgggaggccgaggtgggtggatcatgaggtcaggagttcgagaccatcctggctaacacggtgaaaccccgtctctactaaaaatacaaaaaattagctgggcgtggtggcgggcacctgtactcccagctactcgggaggctgaggcaggagaatggcatggaggcaggagaatggcatgaacccaggaggcagagcttgcagtgagccgagatcacaccattgcactccagcctgggtgacaaagtgagactccgtctcaaaaaaaaaaaaattaaaaataaataaaaataaaaatagactagtttctccataatcgttttccttgctttcatataaattttaaaaatttatttcagcctgtatgttagcaatctctggtcacattacctattctcaagagtcactctgttgggaacatctcaggccttctctaaagtattgctagcacaccactctgagacgtgggagtctgtcttcccctgtcgcctccctccccttacatcttctgatcaactccacctgcccattctttcatccttcctagtgactttttctggttcatcagaaccttacccagtctcaaagaaaggagtgtgataaggcaaacaactctaaataaaatacagttctgtatctttctatgcaaataagcctttgttaatttttatttagtgttgtaccacttatttgaatgtctgacaggttctccagcaagtagataacaagtttattgcctgtttgatgagcactaagactgaagagaatggcgaggcaggtaagaatggagtttagcctgaatgattaaccagctggtcttcttgtaacctttttttaatgattatttttggtatataatatagtttcaatgatttggatggattagggaaagccaatctaaaactaagaatattatgaaggctgggtgcggtggctcacacctgtaatcccaacactttgggaggtgaggcaggtggatggcttgaggccaggagttcaggaccagcctgagcaacatggcaaaaccccgtctctactaaaaatacaaaaattagctgggcatggtggtgtgcacctgtagtcccagctactcaggaggctaaggcacaagaatcgcttgaacttgggaggcagaggatgtagtgagccgagattgcgctattacactccagcctgggcgacagacatttagttttatgttcatacacatacatatactcaggatgcacattaaactatcaagagtatttactttgggagtgaaaatgagggtgtgcaaaggagatatttcaacttttactctttttgtcttttttttttcctttttgtggagaacggggtctcgctatattgcccaggtaggtctcgaactcctgggcttaagctatccttccacctctgcctccctaacagctgggattacaggtgtaagccaccacgcccagcccatcttttattcttttaaatattttctattgtttgactttttaataatattttcatgttttccctttataataatagaaagtgtatataatgaactctgctaggtttgtcaatatttacacagaatctcttggtgacctgctctaatgaaacaataatagtttgtaaatatattaactcattcaacaagtattaattgagtgcccattgtatgccagggactgtaccaggccctagggatacaataatgagaaaagatatatatgcaagagaaaaaaataattacacaaacataaaattttagttctagcccctgtaatggagaaagagatacaagatgctctaagaacctgtattgggagatttgatttcatcagggagttcagggaagtgcttcttggtaaaatgaggtctgaatatgaatatgagttaactaagtaaagaaaggagggaacaaccatgcaatttgtgatttattctcctcagtgagtggaaacagggcaaggggaactggagatgaggctagagaagtaggtaggagtcagatcttaaatgccagctacaagctttgctttgtcccaatactgttggaaaccattgaaagcttttttttttcattttttatcatttgtattttgatgttgtttttggggtggtacatgtcacatcacatttgcattttaaaaagattgctctggttgtagtgtggagaatggagtaggagtaggggtggagtcccagttaactgtagattgactgttaaaagaatattgcaatatctgagacatggttagatgggaccagggtggactagagagcagtgaatgtattggaaagatatttaggagatagagtcagcagggcttggtgatggattggatatggggaaagtatgtaaaagatgacttctggtgttctggcctccatagctgagttgatgatgttgcaggacccgtgttgcaggcagagcagagaggatgaaaatcatgagttcagtctttgaaatgctccagaagagatgtcaaggtggccaggcacggtggctcacgcctgtaatcccagcactttgggaggccgaggtgggtggatcacctgaggtcaggagttgagaccagcctggccaacatgctgaaacgctgtctctactaaaaatacaaaaattagctggacatggtggcagatgcctgtaatcccagctactcgggaggctgaggcagagaattgctttaacccgggaggcggaggttgcagtgcgccaagatcgcaccactgcactccagcctgggtgacagagcgaaactctgtcaaaaaaataaaataaaaagatgtcaagaatgtggttggatattacaagtctggcctagacaagtgttctgacatggagatacaaatttgagccatcagatgcagaaaagtgatcactgaaaccctggatataaatgttatcacctagaaaaaagaagagtgaggagaggtcttgaatctagaataattctagcacttaagagctcggtagaagaggatgaaccagcaaaagagactgtgaaagaacagctagagaaataggaagaaaacagaagaatgttatgttggaaaaccaggatgtcatgccaaacgctgccaagacattaagtaagatgaggatcatctgattttgtgacagtagagattagggattttagcaagtgagagctgtttcagagaatagacaggacgagatgctgatggtgctaatggagactgcaaggagatactcagaaatgtgcccatgacacggaagagggactacagagggtgagggtgacagaggaccttttttttttaatgggagaaacttgagcacatttgcaagggatgcctgatgggataaagtccctgaaaaggcctgagtggctgagccctgagcagcagtggagggctggctccagcttgatagtacctgcaggcaagtgctaaagttttagagcatttattctctatgtatttcaaaatattccctttaccttgtttagtaaatgtcatagcagatcaaaggcaaattaacctaaagttctgtcagaattatcatgaatatagaatttgtgaagatcaaattcctatagttttactatttctagaaaagtaatagttttttgttgttgttgtttttgagacgaagtttcactcttgttgcccaggctggagtgcaatggtgcaatctcagctcactgcaacctccgcctcctgggttcaagcggttcaccagcctcagccttccaagtagctggaattacaggcacccgccacccacgcccagctaattttgtatttttagtagagacggggtttctccatgttggccaggctggtctcgaactcctgatctcaggtgatccgcccgccttggcctcccaaagtgctgggattacaggcatgagccaacccgcctggccaattttttttttaagttttcattatctggaattctttgttgtttttgagatcagaatctctactaatgatactcaagatgggtgtaactacaaaatctgcagatgttgaaagaagcaaaatggatctgttgaaatttctctttttttctttacttttttttttttttttttttttttgagatggagtcttgctctgtcgcccaggtgggattgcagtggtgcaatctcggctcactgcagtctccccttcccgagttcaaggaattcttctgcctcagcctcccaagtagctgggactacaggcacctgccaccacgcccggctaattcttgtatttttagtagagacagggtttcaccatgttggtcagctgatcttgaattcctgacctcaagtgatctgccctcctcagcctcccaaagtgttgggattacaggcatgagccacaggcccagccagaatctgtgttttaataagatccccagggggtatgtgatatgaacgtttgagaagcccaagtctaaggcaggataaacatggcccgaggggaatctgggcatcacctctttctgtacagccagggagatgggaatggtttttacattttttaatggttgggaaaaaaaaagaagactatttcttgacacattaaaattatatgaaattagtatttcagtgtccataaataaagttttattggaacacagctacgatattcacatattgtctatggctgctttggctcaaaaagaattgttgagtaggcatgacagaaatcgtgtggcccaaaaagcctaaaatatttatgatctggcccttcagaaaacgttctccggcttgtgatctaaagtgcactggaagtacattctttgtgggtttccaagtagcttgtacaccaaggttagctgattataacaatgtgttgtttaacgatcctttatcatattaaagttgaattaataaggcaaaatcagtatttaaacataagaattatatattcaagcttcaaacttgaggaaatgccactttgacttttttttttttttttaagatggagtctcactctgtcaccaggctggagtgcagtggtgcaatctcggctcactgcaacctacacctcctgggttcaagcgattctcctgcctcagcctcccaagtagctggaactacaggcgcgtgccaccacacccagctaatttttgtatttttagtagagacagggtttcaccatgttggccaggatgatctcgatttcttgacctcatgatccgcccgcctcagcctcccagtgtgctgggattacaggtgtgagacactgcacccagccctgactatgttttctaaatgagatgctggtgaactaaagagtttcttagtttaccttttgtttcctaaaaaatgaaattatggggaaaataataaaacttataggataaaaattagtaatactggtaatctctggagagagaaactagaaggggtgggggcaagagtataaaggagactttattaaattcccttttgtgcctttcagaattggatctgggattcaaacatatgggataagtttgctatcattttccccataatttcatgttttaggaaataaaagatacaattgttactcctcagaatgttttgtcttatgctgttgttagatagtttgaattaagtcttctctgtcctcaacacacatgatggttgtcgtcttgctctgagaatcaaagttcacaatccttgctcatctaggtgggaacctgctcgtgctggtggatcagcacgctgcccatgagcgtatacgtctggagcagcttatcattggtaaggatctgtttgcagccagaaaaaatttgagactcccagcagaatcagtacacctcaaagagcttttctaactgcaactgttgtgagaaagcacactttgtactgtatgttcaaaaattaaactaaagtcctgcagtttggcctgtgttataattgaaagaatgtggtagttcactaattgaaagatgtgaacttatttatgtggtcagaggcatatttgccagatgttattaacaacccagaagtacgcaaggataggctgcttactctgacatccagcacaaagctctgcccctccatatgcccggtgatcttggcatgccttcccacactccatcaggcagagaccagtggcagctcagaaggcccagtatgctgttttgattttaaaatttagtttgcttttgaatatgcagtataatcaaatagatccaattctgaaaggcacaaaagggaatataataaagtctcctttctatccttgtccccacccctcctagtttctctccccagagacaaccaatatctctggtttttaaatctatctttccaaagcaatatatgctttttaaatgtttttttttgctacccttttcctcatcatgaggcagtgtgttcaccaagtggtaaaataccaggaaagtctttactcctgtggccaatgagtaatgtcaaagagttaggcaaggacctaaggagtgcttcatggactagaatggcaatgatattactactgttttcacttttccttataaaatgacggcctaagagttgggaaagatatagtaaaaacagtgttagaaaaacttacctctacaggccctgcaccatttgagaatagtactaattctctccagagactgggagaccctgctcaaggaaagggaagccttctggagccataagactgtgtggtcaacccacatatgttcctggtaatccacattattcacctctgtcatcaaaacaacatttattaactacaggaacattggcttgttcatctgaatgtaagatgcaagtcttatatttcttattttgaaaaatactaccaaaattgttaataggctgaatatttattagtttgactttaaaaatggaaatccaaaatctaaaactgaacattaaacattctgctttgcattagaatgattatctcaaggccgtgctttatttttatctgaatctagaagacttcccttcctactcttaacccattcatctttctgccaatagattcctacgagaagcaacaggcacaaggctctggtcggaaaaaattactgtcttctactctaattcctccgctagagataacagtgacagaggaacaaaggagactcttatggtcagtaccaccatgagaatgtgatgttgatggtatcaattctcacaataattctgtgaggaataagcataactattgttccatttctcagatgagaccaagagaggttacaagacttgtctaaggtcatagcagttattaagtagtggagcaggcactcaaaggcaggtcgtctgactccacaggctgtttgtttccttttttaaaatatatttttttctgcatccaatcatccattaaaatatttattttgtgagacatggtctcactctgttgtccaggctggagtgcagtggcacaatctctgctcactgcaacctccaccttccaggctcaagcagtcctcccacttcagcctcccaagtacctggaactacaggtgagcaccaccatgctggactaatttttgtaattttttggtagagatgggttttcgccatgttacccaggctggtctgaactcctaggctcaagcgatcctcccactttggcctcccaaagtgctgggattacaggcgtgagccactggacccagcctattctttccactgtatcccagctgaagagtataggatagagtttccctgataattttttccagcagttggcttagaacactcttctcatttcttggaacagtctgtgtttatgccatgctttgtgaaagcaaagtttctgcagtaattggtcccattctgctttgctttggtgcattctagactcttagttttcattatcgtaatcataatgggaagaaagtaaaacattgggatgtaaggaaggggcgaatcatatagtgagtcacaagataggatatttttcctcttctaggcagcacaaattattgaaaatgaaaaagaaatttctcccaatatgtttcaggtttgggaatatgatactgccagtaaatctttttttccctatgacataatttatattagaggcagatctatttacttacatcccgttagtcaggacttctcaattccttgggctgttaattacctccctgctttaatgctgattcaaatcactctcagaccttttcttcatgccagactcccttaagtgccagcagccagaagttagcagttcctcaatgaagaaaacacacttagaaacaagacttagacacagattgattcccaatggaaaagagaaaaacaataaaggttactgtaattcaaaaaggaaatttgataataaaaaatcccaaacacccacacataagtgtgagaaaaacaatacggttgttaagccctgtggcagcttttgaaaaactattaagtagtatttggaaccagtagtgaagtgcaaatgaagtagcactctttttttttttaacatttgaggttatctctttaggtgttaccacaaaaatctggaagatctgggccttgaatttgtatttccagacactagtgattctctggtccttgtgggaaaagtaccactatgttttgtggaaagagaagccaatgaacttcggagaggaagatctactgtgaccaagagtattgtggaggtaagacacagctgcagatgttaaggaaattgctgagtgatggtaacctcatattttgtctgtagattctctgaattcatcttttcttcaacaagtattcatggtatttacctgcggtgtgccaggagctagaaattcagagatgagttagctcaaaataaggaagaagggcatttaaagaattatagtcagtgaactttggctagtagaggtatgtgttttgctttcttcccagtgataaaggtaatgaaaactaagagtctagaatgcaccaagatagtttttcagaagtgttatggaaacacagaatgacttgtgtgcctggggaggtgaagtcaatgaaaatgtcacagaaaagctgttttcttaagaaaagtttttacttttgagagaccaggtctcactctgttgcccaagctggagtgcagtggtgcaatcatagctcactgtagccttgatctcctgggcacaagcaatcttcctgcctcagcctcccaagtaactcggactacagacacgcaccaccatgcctggctaattttttccttttttttttttgtagagatgggggcctcactatgttgcccaggctggtcctgaacttctggcctcaagcaatccccttgcattggcttcccaaacccccggcactacaggcatgagccactgcacacagccagaaaagtcttacagaatagtgggaaactaggctgggcaaggtggctcacacctgtaatgccagcactttgggaggccgtggtgggtggttcacctgaggtcgggagttcgagaccagcctgacaagcatggaaaaaccccatctctactaaaaatagaaaattagccgggcgtggtggtgcatgcctataatcccagctactcaggaggctgaggcaggagaatggcttgaacctgggaggcggaggttgcattgagccaagattgcaccattgtactccagcctgggcaacaagagtgaaactctgtctcaaaaaaaaaaagaaaaaaagaatagtgggaaagtgctgagtacagaagaggggagaagggcattctagacagaggaatacatatcagagacttgagatacatcctatgtttagggaactatcaatagatatggctcaaattaagatctacagttgatccttggataacttgggtctgaactgcgcaggtacacttaaatgcagattttctttcacctctgccattcctgagacagcaagaccaacctttcctcttcttcctcctccttagcctattcaatgtgaaaatgatgagggtgaagacctttatgatgattcatttccacttaatgaataataaatatattttctgtttcttatgattttcttaacattttctttttctttctttctttctttctttcttttttttttttttttgcgatgcccaggctggagtgcaatggcacaatctcagctcactgcaacctccacctcccgggttaaagcgattctcctacctcagcctcccaagtagctgggattacaggcgcacaccaccatgccccggctaatttttgtatttttagtagagatggggtctcaccatgttggccaagctggtattgaactcctgacctcaaatgatccacctgccttggcctcccaaagtgctgggattacaggcatgagccactacgcctggccaacattttcttttctctagcttacttaattgtaagaatacagtgtgtaatatatacaacacacaaaatatgtgttaatcaactgtttatattattggtaatgcttctgatcaacgttaggctattggtagttaagatttggggaaatcaggccaggtgcagtggctcacgcctgtaatcccagcattttgggaggccaaggcgggcggatcatttgaggtctggagttcaagaccagcctggccaacatgatgagaccccgtctctactaaaaattaaaaaattagccaggcatgatggtatgtgcctgtaatcccagctacttgggaggctgaggcatgagaattgcttgaacccggaaggtggaggttgcagtgatccaagatcactgcactgcactccagcctgagtgacacagtaagactccgtctcaaaaaaaaaaaaaaaaaaattggggggaaatcagaagttatacttggatctttgactggatgggagttggctagatgggttgtcaaggtcaaatcataaaataatttagcatattctactaagtagtttgcattttatcctataggcagccagtgaaaacttttaagcaggagagtaaggtccattttagattgcattccaaatatgattactttacatatatgttttggtaaaggtttggaaagctactgctgggctgtggcattggaggtattagagagaactattactttttattttgattacttatatgtttctttttttatagcaaatatcatttattttgtctttattgtctttttcctctcctttcctgttttctattatagttttctgtatttctctttttttttttgctctactcgtttagaagttatatattccatttatatccttttagagattagccttaacttttagcatgcatacttatcaaagtttaaaagtaattcacttctctatcctcttcctaactgtaccaaaatcttacaaactgttcatctcccatcaccctcctcccatcttccatgttgctgtctagtactttaattccaccttgtttttaattccctggtggtcatttattttatagtcaatctttatttagattaaaaaaagtgttcaccagagtctttgttcaccattgcctcttgcatcctacttattctgtgttcttttgggttttttttttttttttttttttttttttttactgaagtaaatctcttacaagatcttttatccacaaacagatcttgagacaaaaaatacaaaaatataaaaataaatagaagttattttagtaagagtccgtgggccaggcatggtggctcatgcctgtaatcccagcactttgggaggccaaggcgggcagatcacctgaggtcaggagttttgagaccagcctggccaacgtggtgaaaccctgtctctaccaaaaatacaaaaattagctgggcatggtggcaggtacttgtaattccagctactcgggaggctgaggcaggagaatcacttgaacccgggaggcggaagttgcaatgagctgagatcacgccattgcaccccagcctgggtgacaagagtgaaactctgtctcaaaaaaaaaaaagtccgtgaatgataagctgtcttttaaagtatctttattttgtcttcatacttgcatgattatctagctaaaaacagaatttcacattgccagttatcccccccgcattttgaaaatatttcactacttttgactttctattttattttattttatttcattttttgagacagagtctcactctgttacccaggctggagtgcaatgggatgatctcagctcactgcaacctccgcctcccaggttcaagcgattctcctgcctaagcctacaaagtagctgggattacaggtgcccaccaccacacccagctaatttttgtatctttagcagagatggggtttcaccatgttggccaggctggtctcaaactcctgacctcaggtgatctgcctgccgtggcctcccaaagtgctgggattacaggtgtgagccactgcacccagcctgactttctgttttagccattgaagtccttagtcaatccaattattactctgtaggtaatctgattttccctctggttgcttttacgatggttcactttgtctttggtgttctgcaatttccctatgatgtatctttgtatggatttattttcatttccttctggagattcactatgcttcttcagtttggaaagtatgcagtcattatcacctcaaacgtttctttcccattctctctcttgtctcttggaaattttgtcagatatctactgggccttatctttctactctgcatgcctcttcaactctcttccatatttcccattgctttctctctgtgatacattctgtgaaatctcctcacttatcttccagtgaactaaagtatctcttcatcttctgtttaattatgtgtttagcttatccactgagttttttatttcagtgactaaattttttatttcaatggctatattttttatttccagaagttgtgtttttttccccaaatctcactcttccttttttatggtgtcctgcttttttcatgattgttccttctcctttatcagtagctttcttgatttggagcacaggcaaatccacacccacctcatctagaagtctgaagtgctttagtaatatctaaaatagtaaaatctaaaattagaggatagatgtagtagataaattgggggatggatttatgtgggaagatttgagtcagggagagcagctgacgggttattgcagtggttaaggtaagagaagatgaggattggactgagtcagtagcagagggagtagagaggagtgacatatctgagacagaatttgggaggcagaagcaagaggacttggtgagcaatcaaacgtgaaaggaataaaggagaaaacaaaagcaacagtgattctgagggttgtagcatggatggctggaaggatggtggtgccattgacagagaagggacacagatgaggaggaacaaacctgcctaggagttccatcgtgaaggtgggtttagacacagtgaatgtgcctgcaggtggaatgcccagtggataggcacacttaaaagatctggtacttggaaaataaatctgggctgtacatatctatctgagagttaacagtatatatatattgatagtatcagaagctggagaagggccttgaggaagtgaggttgtccagggagaatatggagagtgaaaaggaagagacaaaagagtggagcctgtggaacatcagcatccagggtgcgtatgctttggaaaaggtctggaaagctctgctgaaaagaggaaattctaaggatggctgaaaatacttggttagagagggaggaggaaaaccaggaaaaagcaatattgccaaaactaaggaaagttttaagcaaggagggaatggtcaataacggctatgaagtagagcctgaaacgctggacttgactgtcatgaggacattagttgtcttgtggaatcatttcctggggatgaggtggggcagaagataagagtgcagtgagtcaggagtgcgtgaagcaggaggaagtgaagctaagtagacaactctttcaggaactttggctacacacagaagaagagagatggggtgagagctaaaggttagaagtggttgggaagtgtggggtgggattcaaggctgaggaaaggtgtttgtttgctttaagacaaaaaagacgtaagcaggtttgcaggccaagggggaaacattcaagaggaagagcagctgtcagtcagctcttgggtcatcttggctttgccctttccagaatcgcctttggatcagacagatccaaagatttgctctgcttccagcaaagctctttcctccccacagacatgctttctctaagacccctgctccaaattgtcctaaatccaaaagataggatctgttagagtcttttattgtaattcaatccctaatatgtaaccagaaaattataagaaaaacttttcctgaaggaacttaaaagactactgttaaggagtttgcttcaaatggaaacaaacctctggtttcataaaatcttgattatcctatgtcaggctgatcaggagagactttgtgtgattctggaagaagctggaacagttttggtgttttgaggaggtagctatttgaatcctagcagttgaaagatcattaatacatccttctataaagctctatcttctagcctggtgaggaggtggaggctgcagtgagctgagatcgcgccatggcactccagcctgggcaacaacgagactacgtctcaaaaaattaaaaataataaataaatacggccaggtgcagtggctcacaactgtaatcccagcactttgggaggccgaggcaggcggatcatctgaggtcgggagttcgagaccagcctgaccaacatggagaaaccctgtctctactaaagatacaaaattagccaggcgtggtggtgcatgattgtaatcccagctactcaggaggctgaggcaggagaatcgcttgaacccagaaggcagaggttgcggtgagccaagatcgtgccattgcactccagcctgggcaacaagagtgaaactccatctcaaaataagtaactaactaactaaataaataaataaaaaataaaataaaaatattaaattatccagcattaaacagaccattggaatataaaatggactgagatgagacccatcaccccttcactaagcttacaaacagatgttttaccatcccagatgtacaaacacaagaatgtttgctctccatccacactaagctttgtcagtggattgagtcttatgagaccatctttctgtttaggtttgtttgggaaaacatgtgatttttaaattatatgtaatatagtatctactacctagctcttgataactgtgcccatttataggcatggcagactagagtatagatgaaggagggaagagaatttcctgagtctggttttaaaagaaaaggtaccatgttgtaatcttaggagcagatttacacatagccttttccaggagtaaagaaatgattttcttataaagaaatcattaaatgtgcaacaggtttttttctttttacctccagaggttaaacaaattggtagcatgaaatagtgtctgctttaaatttctttaagcttcttttgtaaatattaatatccacagggatataactattgaaaaggttaccccagggacagagacatgcaagggaggagaaatttctcaacaaagggcctcagaaaataaactttctgacctgaagggaattgtccccaaaaagcccgtgggaactaaagtgactgtttacttatgtttatgatatttaagcaagtgttatactgagcagtggttgtgttgatggttgttgtgtatttattctcagtttgtgtgtaatattacgcttgttctggctaagattacacacacaaacagacagccttttagtgagaagccttcctgatgttttgaattggttgaatcatcaaggctactctcaccagctacataacctcattagttgagaagctatctctggaggaagtctcagtagctaaatatattctgtgttcaataagagttctattcagttgcttggttttttcatattcaaagtgccttacaacaaataaatttgtacccaagtgctgtattgctggaactctttctttcaggaggcatgatttaaagaagaaaattgagatattttgtaaactatcaaagggcaagtaaaacataaccgtagattaaagccgattttccttttgctttgcaggaatttatccgagaacaactggaggtaagcttttcctttattttggggtttcacacagaagcaccacacataaaaggcttcgttgttccgttttcttttcctgttaataacgtgtttatgcattagctactccagaccaccggaggcatccaagggacattgccactgactgtccagaaggtgttggcatcccaagcctgccatggtaagcccttcaacatagcagtgatcaaacacctctgcatgcagagccctggcagggctgccgggattacaaaagaggcagagggtacatttactacttgactcttggagaatacaatttagatcaagaaactgaatatacccttttaaaaatcacttttacaaaaacaaaatcccaacacaaaaatttgactatagtgctgcctgacctatatgagtggaggaataactcctagaggagatgcattttgagatgaattttgaatgagctggggaacatgggttcatagcatggaaaggggaattcactatagggagagtaaacagcctgtgcagagaggcagaacagaaacaagttagttatatgagaagcagcaaagagtatcaagaaactaggcaggtaagagaacagaaacctagaaggtcacagcaaaacctttggatttgatacagaaggcattagaattagcaagcgttctttttttatctttccaactttcattttaggttcagggggtacatgtgcactttgtaacatgggtgagttgcatgtcgcaggggtttggtgtacagattattttgtcacccaggtaatgagcatagtacccaataggtagttctgatcctcacccacctcccaccctccaccctcaagtaggcccaggtgtctgttaccccttctttgtttctatgtgtattcaatgtttggctcccacttttaagtaagaacatgcagtatttggttttctaattcacttaggatgatggcctctagctctatgtttttgcaaaggatgtgatctcgttcttttttatggcgacatagtattccatgatgtatatgtaccacattttctttatccaatccaccattgatgagcattgaggttgattccatgtctttgctattgtaaatagtgctgcagtgagcataacacatgcatgtgtctttatggtagaatgatttctgtttctttgggcatattcccagtaataggattactgggttgaatggtagttttgctttaagttctttaagaaatctctaaactgttttccacagtggctgaactaatttatatttcccaccagcagtgtataagtgttctgttttctttgcagcctcaccagcatctgttattttttaactttttaataccagccattctgactggtgtgagatggtatgtcactgtgattttgatttgcatttctctaatgattagtgacattgaacattttttatatgcttgttggccatgtgtatgtcttcttttgagaagtgtgtgttcatgtcctttgcccattttttaatagggttttttggtttttgcttgttaatttatttaagttccttatagattctggatattagttccttatatagattctggatattagacctctgttggatgcagtttgcaaatattttctcccattctgtaagttgtccgtctattctgttgatagtttcttttgctgtggagaagctctttagtttaattaagtctcacttgtcaattttcgttttattgcagttgcttttagagtctttaccaggaaatctttgccaaggcctacgtccagaatggtatttctgaggttttcttctagggtttttgtaaaaagatggaatgcgcccaggcgcggttgcttacgcctgtaatcccagcactttgggagaccaaggcggatggatcacctgaggtcaggagttcgagaccagcctggccaacatggtgaaaccccatctctactaaaaacataaaaattagccaggcgtggtggcgggcacctgtaatcccagctactcaggaggctgaggcaggagaatcacttgaaaccaggaggtagaggttgcagtgagccaatatcacgccactgcactccagcctgggtgacagagtgagactccatctcaaaataataataataataataataataatgaagatggaatgcttcatgaatttgcatgtcatccttgtgcacggaccatgctaatcttctccgtatcactccaattttattatatgtgctgccaaagcgaacaccattgagggttcttgagcagggtaatatgatacaatatagaaaatggggagctgggtgaggccctgtgaggaaggtgcctgcttctccttcaccttccgccataattgtaagttttctgaggcctccccagccatgcagaactgtgagtcatttaaatggtctttcctttataaatgaccgagtcttggtcatttcttcatggcagtgtgagaacagactcatactcctctatcaccaaatgtcatcattgccaccttcaaaatgtatcttcggtccgtctgattcagtctgtctggctcctccctcatttttgccactgttgagctctcttacttagttcttcacatccactctggctccctttcaagctgctcttctctcagcacccagaggaatctttttgaaacatccctccaagcatgttgttcttctaactaaaatgtgtcaatgatgacccattgctcttgggatagaaatgtgattttttactgtggcccacaagggtcttcgtgatttggcccctgcctgcctctccagtgtcacgtcatatcactctccaccttgttctttacatcccagcctgcttttttggtcttctgcttcctgtgtgctaaacatttgtcagcgtcggggcctctgcactggccttctcctctacctgaaacacttttctctccttcttcaattagccacgtctttcttaacctaaagtctcagcttgaatactactttgccaggaaagccttccttaagctcctaaactgggtttggtcttcctattatatattcatatcctgtattttatagcacctatatttatcatttaaattattgtataattatctgcttcatgtttgtctcccctattagaccataagcgccatgaggatggaaattatctgtctcactaactgcctgacaaagctcccaatacaaagtatatacttaataaatatttgttgactgggtaaattgtgcataaaggcaggttataacaatatgagagtttagattaggaagattattatggaaattagaaaaaaagaagcaaataaaatgaacattgtaaggaaacaatcagagattgctattggacgatccatggagaaagataaccccaacttcacaaacccataaagagtaggcaaaaatactgctcttgcctcttggagaaaaactctgaaagccagatcctaacaagttaaggaatgcctcctacagagattagaaatacaaatactccgtaagaaaaagctgagagacagaaggtcagtcctgaagccttagtttcatccatggtcataagcactaatttatttccctctttttttttttttttttttttttttgagaacggagtctcgctttgttgcccaggctggagtgcagtggcgtgatctcggctcactgcaacccccgcctcctgggttcaa

SEQ ID NO: 609 - DNA, 32191 bp, Homo sapiens
cttcagaagcgtgtgacttccgatgagaggagcaatttccaggaagcatgtaataatattttagattcctatgagatgtttaatttgcagtcaaaagctgtgaaaagaaaaactactgcagaaaacgtaaacacacagagttctagggattcagaagctaccagaaaaaatacaaatgatgcatttttgtacatttatgaatcaggtggtccaggccatagcaaaatgacagagccatctttacaaaacaaagacagctcttgctcagaatcaaagatgttagaacaagagacaattgtagcatcagaagctggagaaaatgagaaacataaaaaatctttcctggaacatagctctttagaaaatccgtgtggaaccagtttagaaatgtttttaagcccttttcagacaccatgtcactttgaggagagtgggcaggatctagaaatatggaaagaaagtactactgttaatggcatggctgccaacatcttgaaaaataatagaattcagaatcaaccaaagagatttaaagatgctactgaagtgggatgccagcctctgccttttgcaacaacattatggggagtacatagtgctcagacagagaaagagaaaaaaaaagaatctagcaattgtggaagaagaaatgtttttagttatgggcgagttaaattatgttccactggctttataactcatgtagtacaaaatgaaaaaactaaatcaactgaaacagaacattcatttaaaaattatgttagacctggtcccacacgtgcccaagaaacatttggaaatagaacacgtcattcagttgaaactccagacatcaaagatttagccagcactttaagtaaagaatctggtcaattgcccaacaaaaaaaattgcagaacgaatataagttatgggctagagaatgaacctacagcaacttatacaatgttttctgcttttcaggaaggtagcaaaaaatcacaaacagattgcatattatctgatacatccccctctttcccctggtatagacacgtttccaatgatagtaggaaaacagataaattaattggtttctccaaaccaatcgtccgtaagaagctaagcttgagttcacagctaggatctttagagaagtttaagaggcaatatgggaaggttgaaaatcctctggatacagaagtagaggaaagtaatggagtcactaccaatctcagtcttcaagttgaacctgacattctgctgaaggacaagaaccgcttagagaactctgatgtttgtaaaatcactactatggagcatagtgattcagatagtagttgtcaaccagcaagccacatccttgactcagagaagtttccattctccaaggatgaagattgtttagaacaacagatgcttagtttgagagaaagtcctatgaccctgaaggagttatctctctttaatagaaaacctttggaccttgagaagtcatctgaatcactagcctctaaattatccagactgaagggttccgaaagagaaactcaaacaatggggatgatgagtcgttttaatgaacttccaaattcagattccagtaggaaagacagcaagttgtgcagtgtgttaacacaagatttttgtatgttatttaacaacaagcatgaaaaaacagagaatggtgtcatcccaacatcagattctgccacacaggataattcctttaataaaaatagtaaaacacattctaacagcaatacaacagagaactgtgtgatatcagaaactcctttggtattgccctataataattctaaagttaccggtaaagattcagatgttcttatcagagcctcagaacaacagataggaagtcttgactctcccagtggaatgttaatgaatccggtagaagatgccacaggtgaccaaaatggaatttgttttcagagtgaggaatctaaagcaagagcttgttctgaaactgaagagtcaaacacgtgttgttcagattggcagcggcatttcgatgtagccctgggaagaatggtttatgtcaacaaaatgactggactcagcacattcattgccccaactgaggacattcaggctgcttgtactaaagacctgacaactgtggctgtggatgttgtacttgagaatggtaagtacgtagtattcatgtgcatgagatgcttttgaagatgggaatgctggacaaggagtaagatcctcattatccaaagagattatctcaacagatagaacattttgaagaccacttataaaacatatgttgtattttcatgctatatgaagatttgctacgtccaacactacttttttttttttttttttttgagacggagtcttgctctgtcacccaggctggagtgcagtggtgcgatctcagctcactgcaacctctgcccccctggttcaagcgattctcctgcctcagcctccagtgtagcttggattacaagagcatgccaccatgcccagctaaatttttttattttcagtagagacaggatttcactatgttggccaggctggtctcaaactcctagcctcaagtgatccacctgcctcggcctcccagagtgttgggattataggtgtgagcccgcacgcagcctctaggtccaacactatttaaatggagaagtacagtgaaaggatgtcagtgtgtgtatatgtgtctatgggtgtgtgtatgtgtaagaaagggggtgatgggtatatacctagagcaacaacaaaaggggtgagactgtccaattttaataaaaatgatactattaatagttgggaagatccacagtactttcctaccttgttttcccttcctgttaaatgcccagctttcctagaaatgtgtctttaaaggcacctgcagtgtcagcatggtattttactggaagtttctctgcgtggcttccaggttaagggccagaatgattctgtaatcatcctaggtttcccagtaaactctatggcttagtacagtactacatttatgagctttttctttctagaaagtaggacttgtccatgaattttcaaaatataggtcaagtatatactttcatgactatacttttcaaatgtactttattataatgcatatggtaaaatctccttgatgtgtttatggtacaagtagctgttattcaggaagacaataatatggcatttatttatttgagacagagtttcactcttgttgcccaggctggagtgtagtggcgtgatctcggctcactacaacctccgcctcccaggttcaagggatcctcctgcctcagcctcccaagtagctgggattacaggcacccgctaccacacccggctaattttttgtgtttttgtagagacagggttttaccgtgttggccaggcttgtctcgatctcctgacctcaggtgatccacctgcctcggcctcccaaagtggtgggattataggcgtgagccactgcacccaaccaatatagcttttagatcgtaccacagggctacattagagcctgcactaggactctgggttctcggtccacatttaaagtgatattgctttggcagtgtgttgagagccagatgttgggaggtgataaagctgatttccatctggctataatcttggctttgcactaggaggataaacattacatctgtatccgtatttaaaattttgaatgctgcagaagaatggaacatgtataaatgtagttataagtcaatttctaatttctcctgacgatgaatatctctagcagaaagctgtggtttctttaaggttaaatgaaacctttacttttcagtgtttttctgtttttccttgtgaaaaaaaaatcactgtagtaacttcagtagtatttcatagtattttgtagtattcattaggagaaaactcatttctttcactgttgttcctgagactatcaagttgctcttaaagccactttatgtgcttttcaatctatgtggttttatgtcctgacttacactgaaggcttttcagaggtaaatctacagcactgacacctcatcttcctgaaatgcaactgcttctgatatggtgccaaaaaataactggattacattatactgtgagatggctgttgctaaaagaaagggggaaatcttagctgccatattcaacgtaaatatttcttccttttgaatatagacgtttaaaacactttaacctacttaacattctggattagcatacttttttatgaacttttgagggtcatgttaactgatagtttcctaatgaaaaatatttttggtatagaaagaagttccatgaacagatggctcctcagtaccctgctacctttctggaaatggctgatatacatcatgacatcaggacattgtcaaactttacataaaagtgttacatgaaataaattgttaaaagacaattttttttttttgagacggagttttgctcttgttgcccaggctaaagtgaaatggtgcgatctcggctcactgcaacctccgccttctgagttcaagcgattctcctgcctcagcctcctgagtagctggaattacaggcatgcgccaccatgcctggctaattttgtatttttagtagagacgggatttctccatgttggtcaggctggtctcaaacccccaacctcaggtgatctgcccgcctcggcctcccaaagtgctgggattacaggcgtgagccaccagcctaaaagatacattttaatgtacagaaggaggatctataaaggtgattttgaggagtagtgtcaagtccccaagccttggtaattttttctttaaaatatattttatgcagttctttctattgtagttataaaccttatttcacttcattatcttaattttatcattcttaacctctccaggtttagtccaacagatttatctctcatgttttcctcctgttctaaagctgtcaaattcagcattgtttctaaaactcaaatctgattatccttcatggagaagaacagcatttgggccagatcttactagactctggagtttgaattgagaacctttcatttgtctacctgttcactttttcatgcagcatttgttgatcatccacactgtgctaggtgctgtcacgttgcaggttaactgactttgcttttaggagttcacagtactattagggaagatagctatctaaatataattgtattataatgagacaaatgttaggatagagacatacattggagataagagacataagttggagatttgtgaaggttgcaccaagttatggctgacaagtactgctgtatgtctaacacagggcttctctgggtaattttttgttgtaaggtttgtcctatgcattgtagaatatttagcagcatccgtggcctttatctgctagatgctagtagaacgtagaaccctttactcaagttgtgacaatgaaaagtgtctcaagccgggcacagtggctcacgcctgtaatcccaacactttgggaggccgaggcgggtggatcacaaggtcaagagtttgagaccagcccggccaatatggtgaaaccccatgtctactaaaaatacaaaaaaattagccgggtgtggtgacgcatgcctgtaatcccagctactcgggaggctgaggcaggagaattgcttgaacccgggaggcggaagttgcagtaagccgagatcacgccactgtactccagcccgggcgacagagcgagacgccgtctcaaaaaaaaaaaaaagggtctcaagacattgccaatgtcccctcgtgcaaaattgccccccagtgagaatcacagtgacctattctaggtcttcattctgtctggtatgaatagataatggaactaagcattaatatagagtcctatatggacagcataatttcattaaaggatttctgattctcaatctagtgtttagtagtctgctttatgtcttgactcagtttgtgcagaaagaggttttatgtgattaaatttttaaagagtttacttgtattttaagttcacatttctaggtttttctttcttatatttagggtctcagtacaggtgtcaaccttttagaagcgaccttgttcttcctttccttccgagagctcgagcagagaggactgtgatgagacaggataacagaggtaagggtggcagagagtgctggggcacacagtacacatcgtaccacctaactcaaaaaacaaagcaggcttgcattaagcttgatcagtgccagctgtgctgtactggaatcaggaattccccacggccctgtttaacagcggaactaattaattcagcgcatgcatttaggtcagaaattacttttccagacttgaggtcaatatttgctgattatgcatagtctgtggtgtcttgtgattaggggacatgtttcttatttttaaaaaggctggacttgcactccaagttgctgtagttttatgtaagcaaaactcttcaaaaaaagctacagacatcaattttgtgtgtatgtttaaaaatagataaggtatattttgcttaaaggcagtaaggctataaatttgagccatagcttctctgtcagtattccacaatatctcttttaacagtttggagaaaagctgtaatgccagaagatacagtcaccaactctagtttaaaaagtaacagatcaaaataatttagagatacagcaaacactgaacatttgtagaacatagaaacaatgtacgtgacctttggtcttgaggctatggctcaccaaacaggaaatgccattccctcctttccctgtggttctggatgccaactttacctgttcccttttgccctagatactgtggatgatactgttagtagcgaatcgcttcagtctttgttctcagaatgggacaatccagtatttgcccgttatccagaggtgggtctgtagcagtttttctttgccttttttttttcttcttcttcttcttattttttaaattttgagatggagttttgctcctgttgcccagactgaaatgcaatggcatgatctcggctcacgtaaccttcgcttcccaggttcaagcaattctcctgcctcagtctctcgagcagctgggattacaggcacctgccaccacgcccagcgaattttgtatttttagtagagatggggtttctccatattggtcaggctggtctctaactcccaacctcaggtgatctgcccgcctcagcctcccaaagtcctgggattacaggtgtgagccatcacgcccagcctttctttgcctgttattttaaactttgagtttcaagatgggtacagtggcatgcacttatagtctcagctactcaggaggctgaggtgggaggatcacttgaggccagaagttcaaggctatatagtgtgctgattgcacctgtgactagccactgcacactatagcctgggcaacacagtgagactccatctcttaaaaaataagtaaattagttaaaaataaaatttgaattttatttaagctgggtatgggcatgcaagactatattaatttgtaattatgattggaaactgggcatatttccaaattatgtatttggaaattactgtttaatgtagaggggagaaataaaatttatagcatttgggaactcaggcattttggattaaacatgtataatcaatgtgagaacagtgaatgtgtttaccactctcagaaaccctgacttgtagctttggcacagtattcagggtggtgataatgaaattgttatcattagataaagccacacatcttctactggaggaacagttcctcattggccccgcatggatgttctctcctcagtgtattttcacagaatgtactgtgcatgttataaacagggtgtataatagatgagcatttgtttaccagttctttcctcaagatatcatttgaggacttgatcatggaacatagacaaattgttgttgtgaaacaattttttttgttttgtcagtaattttgtttataagcaaaaatttttatgtaagactcattattcataaattcttttgaatttttttttttttttttttttttttttttttttttttgtgacagagtcttgctgtgtcgcccaggctgaagtgcagtggcgtgatctcagctcactgcaagctccgcctcccgggttcacaccattctcctgcctcagtctcccaagtagctgggactaaaggcgcctgccgccacgcccagctaattttttgtattttttagtagagatggggtttcaccatgttagccaggatggtctcgatctcctgacctcgtgatctgcccgcctcagcctcccaaagtgctgagattacaggtgtgagccaccacgcctggccgattcttttgaatttctataaattccctgaattaaacccacctctagtaggctaaataaaaatgaatgcttttaaagcactctgatatctttggtaaaacaattctgacacaaaaattaaaatttcaattatattttgctgagtctttctaggttgctgttgatgtaagcagtggccaggctgagagcttagcagttaaaattcacaacatcttgtatccctatcgtttcaccaaaggaatgattcattcaatgcaggtaaaagattaacttcaaaatctcataaatatatatatatatatatatggcctaactcttctaaaatttgatttatttaatgatatagaccaccttggtcaaggcacgtgtgtgtgtgtgtgtgtgtgtgtgttcttactagaacttttatcatcagaagaaaaagcaagggattaattataattacaaagaaagaaatatctttagtagtgtaagtaggtttggagggaatgaattatggattcaggctgacagtttcaaggattctcaaggttctcctgcagaagattatatattgactttatatttggcaataatttataaatcaaagtcctttagtgaccttgtccttaagtgtgcaacagtgcccttttagaaattaccttctattgtgtgagcctacacaggtttgggaaagcccatattgagaagtcatttcacaaaagggaccctttgtctgatctgcttttctattttgccttgtgtttaccaccatggctgtcttattccctttgttttcagtacggaaacaaattaggaggctaacaaatttgggtaaactcctaacctggcattgacctggtaccagagcaggcaagcagttgatccagaaatagaccctggggcagtggtataggctcgggggtattggagagcctcaagtacctagacagagaggaaccaccaaggtctaaagccaccagtggcttttaacttacttctttaatagactagcagccgggcgcgctggctcacgcctgtaatcccagcactttgggaggccgaggtgggtggatcatgaggtcaggagttcgagaccatcctggctaacacggtgaaaccccgtctctactaaaaatacaaaaaattagctgggcgtggtggcgggcacctgtactcccagctactcgggaggctgaggcaggagaatggcatggaggcaggagaatggcatgaacccaggaggcagagcttgcagtgagccgagatcacaccattgcactccagcctgggtgacaaagtgagactccgtctcaaaaaaaaaaaaattaaaaataaataaaaataaaaatagactagtttctccataatcgttttccttgctttcacataaattttaaaaatttatttcagcctgtatgttagcaatctctggtcacattacctattctcaagagtcactctgttgggaacatctcaggccttctctaaagtattgctagcacaccactctgagacgtgggagtctgtcttcccctgtcgcctccctccccttacatcttctgatcaactccacctgcccattctttcatccttcctagtgactttttctggttcatcagaaccttacccagtctcaaagaaaggagtgtgataaggcaaacaactctaaataaaatacagttctgtatctttctatgcaaataagcctttgttaatttttatttagtgttgtaccacttatttgaatgtctgacaggttctccagcaagtagataacaagtttattgcctgtttgatgagcactaagactgaagagaatggcgaggcaggtaagaatggagtttagcctgaatgactaaccagctggtcttcttgtaacctttttttaatgattatttttggtatataatatagtttcaatgatttggatggattagggaaagccaatctaaaactaagaatattatgaaggctgggtgcggtggctcacacctgtaatcccaacactttgggaggtgaggcaggtggatggcttgaggccaggagttcaggaccagcctgagcaacatggcaaaaccccgtctctactaaaaatacaaaaattagctgggcatggtggtgtgcacctgtagtcccagctactcaggaggctaaggcacaagaatcgcttgaacttgggaggcagaggatgtagtgagccgagattgcgctattacactccagcctgggcgacagacatttagttttatgttcatacacatacatatactcaggatgcacattaaactatcaagagtatttactttgggagtgaaaatgagggtgtgcaaaggagatatttcaacttttactctttttgtcttttttttttcctttttgtggagaacggggtctcgctatattgcccaggtaggtcttgaactcctgggcttaagctatccttccacctctgcctccctaacagctgggattacaggtgtaagccaccacgcccagcccatcttttattcttttaaatattttctattgtttgactttttaataatattttcatgttttccctttataataatagaaagtgtatataatgaactctgctaggtttgtcaatatttacacagaatctcttggtgacctgctctaatgaaacaataatagtttgtaaatatattaactcattcaacaagtattaattgagtgcccattgtatgccagggactgtaccaggccctagggatacaataatgagaaaagatatatatgcaagagaaaaaaataattacacaaacataaaattttagttctagcccctgtaatggagaaagagatacaagatgctctaagaacctgtattgggagatttgatttcatcagggagttcagggaagtgcttcttggtaaaatgaggtctgaatatgaatatgagttaactaagtaaagaaaggagggaacaaccatgcaatttgtgatttattctcctcagtgagtggaaacagggcaaggggaactggagatgaggctagagaagtaggtaggagtcagatcttaaatgccagctacaagctttgctttgtcccaatactgttggaaaccattgaaagctttttttttttcattttttatcatttgtattttgatgttgtttttggggtggtacatgtcacatcacatttgcattttaaaaagattgctctggttgcagtgtggagaatggagtaggagtaggggtggagtcccagttaactgtagattgactgttaaaagaatattgcaatatctgagacatggttagatgggaccagggtggactagagagcagtgaatgtattggaaagatatttaggagatagagtcagcagggcttggtgatggattggatatggggaaagtatgtaaaagatgacttctggtgttctggcctccatagctgagttgatgatgttgcaggacccgtgttgcaggcagagcagagaggatgaaaatcatgagttcagtctttgaaatgctccagaagagatgtcaaggtggccaggcacggtggctcacgcctgtaatcccagcactttgggaggccgaggtgggtggatcacctgaggtcaggagttgagaccagcctggccaacatgctgaaacgctgtctctactaaaaatacaaaaattagctggacatggtggcagatgcctgtaatcccagctactcgggaggctgaggcagagaattgctttaacccgggaggcggaggttgcagtgcgccaagatcgcaccactgcactccagcctgggtgacagagcgaaactctgtcaaaaaaaaaaaataaaaagatgtcaagaatgtggttggatattacaagtctggcctagacaagtgttctgacatggagatacaaatttgagccatcagatgcagaaaagtgatcactgaaaccctggatataaatgttatcacctagaaaaaagaagagtgaggagaggtcttgaatctagaataattctagcacttaagagctcggtagaagaggatgaaccagcaaaagagactgtgaaggaacagctagagaaataggaagaaaacagaagaatgttatgttggaaaaccaggatgtcatgccaaacgctgccaagacattaagtaagatgaggatcatctgattttgtgacagtagagattagggattttagcaagtgagagctgtttcagagaatagacaggacgagatgctgatggtgctaatggagactgcaaggagatactcagaaatgtgcccatgacacggaagagggactacagagggtgagggtgacagaggaccttttttttttaatgggagaaacttgagcacatttgcaagggatgcctgatgggataaagtccctgaaaaggcctgagtggctgagccctgagcagcagtggagggctggctccagcttgatagtacctgcaggcaagtgctaaagttttagagcatttattctctatgtatttcaaaatattccctttaccttgtttagtaaatgtcatagcagatcaaaggcaaattaacctaaagttctgtcagaattatcatgaatatagaatttgtgaagatcaaattcctatagttttactatttctagaaaagtaatagttttttgttgttgttgtttttgagacgaagtttcactcttgttgcccaggctggagtgcaatggtgcaatctcagctcactgcaacctccgcctcctgggttcaagcggttcaccagcctcagccttccaagtagctggaattacaggcacccgccacccacgcccagctaattttgtatttttagtagagacggggtttctccatgttggccaggctggtctcgaactcctgatctcaggtgatccgcccgccttggcctcccaaagtgctgggattacaggcatgagccaacccgcctggccaattttttttttaagttttcattatctggaattctttgttgtttttgagatcagaatctctactaatgatactcaagatgggtgtaactacaaaatctgcagatgttgaaagaagcaaaatggatctgttgaaatttctctttttttctttacttttttttttttttttttttttttgagatggagtcttgctctgtcgcccaggtgggattgcagtggtgcaatctcggctcactgcagtctccccttcccgagttcaaggaattcttctgcctcagcctcccaagtagctgggactacaggcacctgccaccacgcccggctaattcttgtatttttagtagagacagggtttcaccatgttggtcagctgatcttgaattcctgacctcaagtgatctgccctcctcagcctcccaaagtgttgggattacaggcatgagccacaggcccagccagaatctgtgttttaataagatccccagggggtatgtgatatgaacgtttgagaagcccaagtctaaggcaggataaacatggcccgaggggaatctgggcatcacctctttctgtacagccagggagatgggaatggtttttacattttttaatggttgggaaaaaaaaagaagactatttcttgacacattaaaattatatgaaattagtatttcagtgtccataaataaagttttattggaacacagctacgatattcacatattgtctatggctgctttggctcaaaaagaattgttgagtaggcatgacagaaatcgtgtggcccaaaaagcctaaaatatttatgatctggcccttcagaaaacgttctccggcttgtgatctaaagtgcactggaagtacattctttgtgggtttccaagtagcttgtacaccaaggttagctgattataacaatgtgttgtttaacgatcctttatcatattaaagttgaattaataaggcaaaatcagtatttaaacataagaattatatattcaagcttcaaacttgaggaaatgccactttgactttttttttttttttaagatggagtctcactctgtcaccaggctggagtgcagtggtgcaatctcggctcactgcaacctacacctcctgggttcaagcgattctcctgcctcagcctcccaagtagctggaactacaggcgcgtgccaccacacccagctaatttttgtatttttagtagagacagggtttcaccatgttggccaggatgatctcgatttcttgacctcatgatccgcccgcctcagcctcccagtgtgctgggattacaggtgtgagacactgcacccagccctgactatgttttctaaatgagatgctggtgaactaaagagtttcttagtttaccttttgtttcctaaaaaatgaaattatggggaaaataataaaacttataggataaaaattagtaatactggtaatctctggagagagaaactagaaggggtgggggcaagagtataaaggagactttattaaattcccttttgtgcctttcagaattggatctgggattcaaacatatgggataagtttgctatcattttccccataatttcatgttttaggaaataaaagatacaattgttactcctcagaatgttttgtcttatgctgttgttagatagtttgaattaagtcttctctgtcctcaacacacatgatggttgtcgtcttgctctgagaatcaaagttcacaatccttgctcatctaggtgggaacctgctcgtgctggtggatcagcacgctgcccatgagcgtatacgtctggagcagcttatcattggtaaggatctgtttgcagccagaaaaaatttgagactcccagcagaatcagtacacctcaaagagcttttctaactgcaactgttgtgagaaagcacactttgtactgtatgttcaaaaattaaactaaagtcctgcagtttggcctgtgttataattgaaagaatgtggtagttcactaattgaaagatgtgaacttatttatgtggtcagaggcatatttgccagatgttattaacaacccagaagtacgcaaggataggctgcttactctgacatccagcacaaagctctgcccctccatatgcccggtgatcttggcatgccttcccacactccatcaggcagagaccagtggcagctcagaaggcccagtatgctgttttgattttaaaatttagtttgcttttgaatatgcagtataatcaaatagatccaattctgaaaggcacaaaagggaatataataaagtctcctttctatccttgtccccacccctcctagtttctctccccagagacaaccaatatctctggtttttaaatctatctttccaaagcaatatatgctttttaaatgtttttttttgctacccttttcctcatcatgaggcagtgtgttcaccaagtggtaaaataccaggaaagtctttactcctgtggccaatgagtaatgtcaaagagttaggcaaggacctaaggagtgcttcatggactagaatggcaatgatattactactgttttcacttttccttataaaatgacggcctaagagttgggaaagatatagtaaaaacagtgttagaaaaacttacctctacaggccctgcaccatttgagaatagtactaattctctccagagactgggagaccctgctcaaggaaagggaagccttctggagccataagactgtgtggtcaacccacatatgttcctggtaatccacattattcacctctgtcatcaaaacaacatttattaactacaggaacattggcttgttcatctgaatgtaagatgcaagtcttatatttcttattttgaaaaatactaccaaaattgttaataggctgaatatttattagtttgactttaaaaatggaaatccaaaatctaaaactgaacattaaacattctgctttgcattagaatgattatctcaaggccgtgctttatttttatctgaatctagaagacttcccttcctactcttaacccattcatctttctgccaatagattcctacgagaagcaacaggcacaaggctctggtcggaaaaaattactgtcttctactctaattcctccgctagagataacagtgacagaggaacaaaggagactcttatggtcagtaccaccatgagaatgtgatgttgatggtatcaattctcacaataattctgtgaggaataagcataactattgttccatttctcagatgagaccaagagaggttacaagacttgtctaaggtcatagcagttattaagtagtggagcaggcactcaaaggcaggtcgtctgactccacaggctgtttgtttccttttttaaaatatatttttttctgcatccaatcatccattaaaatatttattttgtgagacatggtctcactctgttgtccaggctggagtgcagtggcacaatctctgctcactgcaacctccaccttccaggctcaagcagtcctcccacttcagcctcccaagtacctggaactacaggtgagcaccaccatgctggactaatttttgtaattttttggtagagatgggttttcgccatgttacccaggctggtctgaactcctaggctcaagcgatcctcccactttggcctcccaaagtgctgggattacaggcgtgagccactggacccagcctattctttccactgtatcccagctgaagagtataggatagagtttccctgataattctttccagcagttggcttagaacactcttctcatttcttggaacagtctgtgtttatgccatgctttgtgaaagcaaagtttctgcagtaattggtcccattctgctttgctttggtgcattctagactcttagttttcattatcgtaatcataatgggaagaaagtaaaacattgggatgtaaggaaggggcgaatcatatagtgagtcacaagataggatatttttcctcttctaggcagcacaaattattgaaaatgaaaaagaaatttctcccaatatgtttcaggtttgggaatatgatactgccagtaaatctttttttccctatgacataatttatattagaggcagatctatttacttacatcccgttagtcaggacttctcaattccttgggctgttaattacctccctgctttaatgctgattcaaatcactctcagaccttttcttcatgccagactcccttaagtgccagcagccagaagttagcagttcctcaatgaagaaaacacacttagaaacaagacttagacacagattgattcccaatggaaaagagaaaaacaataaaggttactgtaattcaaaaaggaaatttgataataaaaaatcccaaacacccacacataagtgtgagaaaaacaatacggttgttaagccctgtggcagcttttgaaaaactattaagtagtatttggaaccagtagtgaagtgcaaatgaagtagcactctttttttttttaacatttgaggttatctctttaggtgttaccacaaaaatctggaagatctgggccttgaatttgtatttccagacactagtgattctctggtccttgtgggaaaagtaccactatgttttgtggaaagagaagccaatgaacttcggagaggaagatctactgtgaccaagagtattgtggaggtaagacacagctgcagatgttaaggaaattgctgagtgatggtaacctcatattttgtctgtagattctctgaattcatcttttcttcaacaagtattcatggtatttacctgctgtgtgccaggagctagaaattcagagatgagttagctcaaaataaggaagaagggcatttaaagaattatagtcagtgaactttggctagtagaggtatgtgttttgctttcttcccagtgataaaggtaatgaaaactaagagtctagaatgcaccaagatagtttttcagaagtgttatggaaacacagaatgacttgtgtgcctggggaggtgaagtcaatgaaaatgtcacagaaaagctgttttcttaagaaaagtttttacttttgagagaccaggtctcactctgttgcccaagctggagtgcagtggtgcaatcatagctcactgtagccttgatctcctgggcacaagcaatcttcctgcttcagcctcccaagtaactcggactacagacacgcaccaccatgcctggctaattttttcccttttttttttgtagagatgggggcctcactatgttgcccaggctggtcctgaacttctggcctcaagcaatccccttgcattggcttcccaaacccccggcactacaggcatgagccactgcacacagccagaaaagtcttacagaatagtgggaaactaggctgggcaaggtggctcacacctgtaatgccagcactttgggaggccgtggtgggtggttcacctgaggtcgggagttcgagaccagcctgacaagcatggaaaaaccccatctctactaaaaatagaaaattagccgggcgtggtggtgcatgcctataatcccagctactcaggaggctgaggcaggagaatggcttgaacctgggaggcggaggttgcattgagccaagattgcaccattgtactccagcctgggcaacaagagtgaaactctgtctcaaaaaaaaaaagaaaaaaagaatagtgggaaagtgctgagtacagaagaggggagaagggcattctagacagaggaatacatatcagagacttgagatacatcctatgtttagggaactatcaatagatatggctcaaattaagatctacagttgatccttggataacttgggtctgaactgcacaggtacacttaaatgcagattttctttcacctctgccattcctgagacagcaagaccaacctttcctcttcttcctcctccttagcctattcaatgtgaaaatgatgagggtgaagacctttatgatgattcatttccacttaatgaataataaatatattttctgtttcttatgattttcttaacattttctttttctttctttctttctttctttttttttttttttttgcgatgcccaggctggagtgcaatggcacaatctcggctcactgcaacctccacctcccgggttaaagcgattctcctacctcagcctcccaagtagctgggattacaggcgcacaccaccatgccccggctaatttttgtatttttagtagagatggggtctcaccatgttggccaagctggtattgaactcctgacctcaaatgatccacctgccttggcctcccaaagtgctgggattacaggcatgagccactacgcctggccaacattttcttttctctagcttacttaattgtaagaatacagtgtgtaatatatacaacacacaaaatatgtgttaatcaactgtttatattattggtaatgcttctgatcaacgttaggctattggtagttaagatttggggaaatcaggccaggtgcagtggctcacgcctgtaatcccagcattttgggaggccaaggcgggcggatcatttgaggtctggagttcaagaccagcctggccaacatgatgagaccccgtctctactaaaaattaaaaaattagccaggcatgatggtatgtgcctgtaatcccagctacttgggaggctgaggcatgagaattgcttgaacccggaaggtggaggttgcagtgatccaagatcactgcactgcactccagcctgagtgacacagtaagactccgtctcaaaaaaaaaaaaaaaaaattggggggaaatcagaagttatacttggatctttgactggatgggagttggctagatgggttgtcaaggtcaaatcataaaataatttagcatattctactaagtagtttgcattttatcctataggcagccagtggaaacttttaagcaggagagtaaggtccattttagattgcattccaaatatgattactttacatatatgttttggtaaaggtttggaaagctactgctgggctgtggcattggaggtattagagagaactattactttttattttgattacttatatgtttctttttttatagcaaatatcatttattttgtctttattgtctttttcctctcctttcctgttttctattatagttttctgtatttctctttttttttttgctctactcgtttagaagttatatattccatttatatccttttagagattagccttaacttttagcatgcatacttatcaaagtttaaaagtaattcacttctctatcctcttcctaactgtaccaaaatcttacaaactgttcatctcccatcaccctcctcccatcttccatgttgctgtctagtactttaattccaccttgtttttaattccctggtggtcatttattttatagtcaatctttatttagattaaaaaaagtgttcaccagagtctttgttcaccattgcctcttgcatcctacttattctgtgttcttttgggttttttgttttttttttgtttttttttttttttactgaagtaaatctcttacaagatcttttatccacaaacagatcttgagacaaaaaatacaaaaatataaaaataaatagaagttattttagtaagagtccgtgggccaggcatggtggctcatgcctgtaatcccagcactttgggaggccaaggcgggcagatcacctgaggtcaggagttttgagaccagcctggccaacgtggtgaaaccctgtctctaccaaaaatacaaaaattagctgggcatggtggcaggtacttgtaattccagctactcgggaggctgaggcaggagaatcacttgaacccgggaggcagaagttgcaatgagctgagatcacgccattgcaccccagcctgggtgacaagagtgaaactctgtctcaaaaaaaaaaaagtccgtgaatgataagctgtcttttaaagtatctttattttgtcttcatacttgcatgattatctagctaaaaacagaatttcacattgccagttatcccccccgcattttgaaaatatttcactacttttgactttctattttattttattttatttcattttttgagacagagtctcactctgttacccaggctggagtgcaatgggatgatctcagctcactgcaacctccgcctcccaggttcaagcgattctcctgcctaagcctacaaagtagctgggattacaggtgcccaccaccacacccagctaatttttgtatctttagcagagatggggtttcaccatgttggccaggctggtctcaaactcctgacctcaggtgatctgcctgccgtggcctcccaaagtgctgggattacaggtgtgagccactgcacccagcctgactttctgttttagccattgaagtccttagtcaatccaattattactctgtaggtaatctgattttccctctggttgcttttacgatggttcactttgtctttggtgttctgcaatttccctatgatgtatctttgtatggatttattttcatttccttctggagattcactatgcttcttcagtttggaaagtatgcagtcattatcacctcaaacgtttctttcccattctctctcttgtctcttggaaattttgtcagatatctactgggccttatctttctactctgcatgcctcttcaactctcttccatatttcccattgctttctctctgtgatacattctgtgaaatctcctcacttatcttccagtgaactaaagtatctcttcatcttctgtttaattatgtgtttagcttatccactgagttttttatttcagtgactaaattttttatttcaatggctatattttttatttccagaagttgtgtttttttccccaaatctcactcttccttttttatggtgtcctgcttttttcatgattgttccttctcctttatcactagctttcttgatttggagcacaggcaaatccacacccacctcatctagaagtctgaagtgctttagtaatatctaaaatagtaaaatctaaaattagaggatagatgtagtagataaattgggggatggatttatgtgggaagatttgagtcagggagagcagctgacgggttattgcagtggttaaggtaagagaagatgaggattggactgagtcagtagcagagggagtagagaggagtgacatatctgagacagaatttgggaggcagaagcaagaggacttggtgagcaatcaaacgtgaaaggaataaaggagaaaacaaaagcaacagtgattctgagggttgtagcatggatggctggaaggatggtggtgccattgacagagaagggacacagatgaggaggaacaaacctgcctaggagttccatcgtgaaggtgggtttagacacagtgaatgtgcctgcaggtggaatgcccagtggataggcacacttaaaagatctggtacttggaaaataaatctgggctgtacatatctatctgagagttaacagtatatatatattgatagtatcagaagctggagaagggccttgaggaagtgaggttgtccagggagaatatggagagtgaaaaggaagagagaaaagagtggagcctgtggaacatcagcatccagggtgcatatgctttggaaaaggtctggaaagctctgctgaaaagaggaaattctaaggatggctgaaaatacttggttagagagggaggaggaaaaccaggaaaaagcaatattgccaaaactaaggaaagttttaagcaaggagggaatggtcaataacggctatgaagtagagcctgaaacgctggacttgactgtcatgaggacattagttgtcttgtggaatcatttcctggggatgaggtggggcagaagataagagtgcagtgagtcaggagtgcgtgaagcaggaggaagtgaagctaagtagacaactctttcaggaactttggctacacacagaagaagagagatggggtgagagctaaaggttagaagtggttgggaagtgtggggtgggattcaaggctgaggaaaggtgtttgtttgctttaagacaaaaaagacgtaagcaggtttgcaggccaagggggaaacattcaagaggaagagcagctgtcagtcagctcttgggtcatcttggctttgccctttccagaatcgcctttggatcagacagatccaaagatttgctctgcttccagcaaagctctttcctccccacagacatgctttctctaagacccctgctccaaattgtcctaaatccaaaagataggatctgttagagtcttttattgtaattcaatccctaatatgtaaccagaaaattataagaaaaacttttcctgaaggaacttaaaagactactgttaaggagtttgcttcaaatggaaacaaacctctggtttcataaaatcttgattatcctatgtcaggctgatcaggagagactttgtgtgattctggaagaagctggaacagttttggtgttttgaggaggtagctatttgaatcctagcagttgaaagatcattaatacatccttctataaagctctatcttctagcctggtgaggaggtggaggctgcagtgagctgagatcgcgccatggcactccagcctgggcaacaacgagactccgtctcaaaaaattaaaaataataaataaatacggccaggtgcagtggctcacaactgtaatcccagcactttgggaggccgaggcaggcggatcatctgaggtcgggagttcgagaccagcctgaccaacatggagaaaccctgtctctactaaagatacaaaattagccaggcgtggtggtgcatgattgtaatcccagctactcaggaggctgaggcaggagaatcgcttgaacccagaaggcagaggttgcggtgagccaagatcgtgccattgcactccagcctgggcaacaagagtgaaactccatctcaaaataagtaactaactaactaaataaataaataaaaaataaaataaaaatattaaattatccagcattaaacagaccattggaatataaaatggactgagatgagacccatcaccccttcactaagcttacaaacagatgttttaccatcccagatgtacaaacacaagaatgtttgctctccatccacactaagctttgtcagtggattgagtcttatgagaccatctttctgtttaggtttgtttgggaaagcatgtgatttttaaattatatgtaatatagtatctactacctagctcttgataactgtgctcatttataggcatggcagactagagtatagatgaaggagggaagagaatttcctgagtctggttttaaaagaaaaggtaccatgttgtaatcttaggagcagatttacacatagccttttccaggagtaaagaaatgattttcttataaagaaatcattaaatgtgcaacaggtttttttctttttacctccagaggttaaacaaattggtagcatgaaatagtgtctgctttaaatttctttaagcttcttttgtaaatattaatatccacagggatataactattgaaaaggttaccccagggacagagacatgcaagggaggagaaatttctcaacaaagggcctcagaaaataaactttctgacctgaagggaattgtccccaaaaagcccgtgggaactaaagtgactgtttacttatgtttatgatatttaagcaagtgttatactgagcagtggttgtgttgatggttgttgtgtatttattctcagtttgtgtgtaatattacgcttgttctggctaagattacacacacaaacagacagccttttagtgagaagccttcctgatgttttgaattggttgaatcatcaaggctactctcaccagctacataacctcattagttgagaagctatctctggaggaagtctcagtagctaaatatattctgtgttcaataagagttctattcagttgcttggttttttcatattcaaagtgccttacaacaaataaatttgtacccaagtgctgtattgctggaactctttctttcaggaggcatgatttaaagaagaaaattgagatattttgtaaactatcaaagggcaagtaaaacataaccgtagattaaagccgattttccttttgctttgcaggaatttatccgagaacaactggaggtaagcttttcctttattttggggtttcacacagaagcaccacacataaaaggcttcgttgttccattttcttttcctgttaataacgtgtttatgcattagctactccagaccaccggaggcatccaagggacattgccactgactgtccagaaggtgttggcatcccaagcctgccatggtaagcccttcaacatagcagtgatcaaacacctctgcatgcagagccctggcagggctgccgggattacgaaagaggcagagggtacatttactacttgactcttggagaatacaatttagatcaagaaactgaatatacccttttaaaaatcacttttacaaaaacaaaatcccaacacaaaaatttgactatagtgctgcctgacctatatgagtggaggaataactcctagaggagatgcattttgagatgaattttgaatgagctggggaacatgggttcatagcatggaaaggggaattcactatagggagagtaaacagcctgtgcagagaggcagaacagaaacaagttagttatatgagaagcagcaaagagtatcaagaaactaggcaggtaagagaacagaaacctagaaggtcacagcaaaacctttggatttgatacagaaggcattagaattagcaagcgttctttttttatctttccaactttcattttaggttcagggggtacatgtgcactttgtaacatgggtgagttgcatgtcgcaggggtttggtgtaccgattattttgtcacccaggtaatgagcatagtacccaataggtagttctgatcctcacccacctcccaccctccaccctcaagtaggcccaggtgtctgttaccccttctttgtttctatgtgtattcaatgtttggctcccacttttaagtaagaacatgcagtatttggttttctaattcacttaggatgatggcctctagctctatgtttttgcaaaggatgtgatctcgttcttttttatggcgacatagtattccatgatgtatatgtaccacattttctttatccaatccaccattgatgagcattgaggttgattccatgtctttgctattgtaaatagtgctgcagtgagcataacacatgcatgtgtctttatggtagaatgatttctgtttctttgggcatattcccagtaataggattactgggttgaatggtagttttgctttaagttctttaagaaatctctaaactgttttccacagtggctgaactaatttatatttcccaccagcagtgtataagtgttctgttttctttgcagcctcaccagcatctgttattttttaactttttaataccagccattctgactggtgtgagatggtatgtcactgtgattttgatttgcatttctctaatgattagtgacattgaacattttttatatgcttgttggccatgtgtatgtcttcttttgagaagtgtgtgttcatgtcctttgcccattttttaatagggttttttggtttttgcttgttaatttatttaagttccttatagattctggatattagttccttatatagattctggatattagacctctgttggatgcagtttgcaaatattttctcccattctgtaagttgtccgtctattctgttgatagtttcttttgctgtggagaagctctttagtttaattaagtctcacttgtcaattttcgttttattgcagttgcttttagagtctttaccaggaaatctttgccaaggcctacgtccagaatggtatttctgaggttttcttctagggtttttgtaaaaagatggaatgcgcccaggcgcggttgcttacgcctgtaatcccagcactttgggagaccaaggcggatggatcacctgaggtcaggagttcgagaccagcctggccaacatggtgaaaccccatctctactaaaaacataaaaattagccaggcgtggtggcgggcacctgtaatcccagctactcaggaggctgaggcaggagaatcacttgaaaccaggaggtagaggttgcagtgagccaatatcacgccactgcactccagcctgggtgacagagtgagactccatctcaaaataataataataataataataataatgaagatggaatgcttcatgaatttgcatgtcatccttgtgcacggaccatgctaatcttctccgtatcactccaattttattatatgtgctgccaaagcgaacaccattgagggttcttgagcagggtaatatgatacaatatagaaaatggggagctgggtgaggccctgtgaggaaggtgcctgcttctccttcaccttccgccataattgtaagttttctgaggcctccccagccatgcagaactgtgagtcatttaaatggtctttcctttataaatgacccagtcttggtcatttcttcatggcagtgtgagaacagactcatactcctctatcaccaaatgtcatcattgccaccttcaaaatgtatcttcggtccgtctgattcagtctgtctggctcctccctcatttttgccactgttgagctctcttacttagttcttcacatccactctggctccctttcaagctgctcttctctcagcacccagaggaatctttttgaaacatccctccaagcatgttgttcttctaactaaaatgtgtcaatgatgacccattgctcttgggatagaaatgtgattttttactgtggcccacaagggtcttcgtgatttggcccctgcctgcctctccagtgtcacgtcatatcactctccaccttgttctttacatcccagcctgcttttttggtcttctgcttcctgtgtgctaaacatttgtcagcgtcggggcctctgcactggccttctcctctacctgaaacacttttctctccttcttcaattagccacgtctttcttaacctaaagtctcagcttgaatactactttgccaggaaagccttccttaagctcctaaactgggtttggtcttcctattatatattcatatcctgtattttatagcacctatatttatcatttaaattattgtataattatctgcttcatgtttgtctcccctattagaccataagcgccatgaggatggaaattatctgtctcactaactgcctgacaaagctcccaatacaaagtatatacttaataaatatttgttgactgggtaaattgtgcataaaggcaggttataacaatatgagagtttagattaggaagattattatggaaattagaaaaaaagaagcaaataaaatgaacattgtaaggaaacaatcagagattgctattggacgatccatggagaaagataaccccaacttcacaaacccataaagagtaggcaaaaatactgctcttgcctcttggagaaaaactctgaaagccagatcctaacaagttaaggaatgcctcctacagagattagaaatacaaatactccgtaagaaaaagctgagagacagaaggtcagtcctgaagccttagtttcatccatggtcataagcactaatttatttccctctttttttttttttttttttttttgagaacggagtctcgctttgttgcccaggctggagtgcagtggcgtgatctcggctcactgcaacccccgcctcctgggttcaagtgattcttctgcctcagcctcccaagtagctgggactataggcgcgtgccaccacacccggctaatttttgtatttttagtagaggcgggatttcaccatattggccaggctggtcttgaactcctgacctcatgatctgcccgcctcagcctcccaaagtgctgggattacaggtgtgagacaccatgcccggcctataagcaccaatttcaagcaggattaaagcttcattaaagaagcctaagaaacatgttactttttccagatatttggcagtgacccaaggtcagcattggtttcccactatatacactataaccttcttgtttctgtctttcatttaggggccattaagtttaatgatggcctgagcttacaggaaagttgccgccttattgaagctctgtcctcatgccagctgccattccagtgtgctcacgggagaccttctatgctgccgttagctgacatagaccacttggaacaggaaaaacaggtacattaatgactaacaggagcaggagggagcaaagtttatcttctctttcttttctggcttttactatgcaactgtaatctgtcttaacctttccaaaataggagagttttgcaaaatctgcattggaagtttcacataaagcctcacccatttcattttccagctcaaatccaaaatggaacttagactgaactgtcaggtcacctacataatggctttgtattttaaaacttaacacatgtacagacttatgtaccctgaatatctattgcctgctggctctaggtttcataatatgcagttctttctgaagctactgaaagttggtagaagcacagcaaattcactgttggcaatatagagcctcaacttccagtttcttgatagtacctgctggaaacggtgatctgtgactgtagctggccatccccaaggatcttgagttatggtttgaggatcatcagacagggacccaagcttggggatctctacattatgctttggccctaattacccagcaacctgcaaactacaatgtggataatgcagaaaaggcacagaatggcttaaatgaagaacttctgtccttgttataatcttcagtgaaggagaacatggagaacataacaggaatgtccctgttgctgctttccaaaatctttcctttttttttgttttttgagacggagttttgctgttgttgcgcaggctggagtgcaatggtgcgatcttggctcaccgcaacctctgcctcccgggttcaagcaattctcctgcctcagcctcccgagtagctgggattacaggcatgcgccaccacgcccggctaattctgtatttttagtagagacagcgtttctccatgttggtcaggctggtctcgaactcccgacctcaggtgaactgtccaccttggcctcccaaagtgctgggattataggcatgagccactgcgccctgcccaaaatcttttcttttgctaacctttccctgctaagggatataaaatcttttcttgcatggagttttcaggtactaatgttgtctgactcaactagctgattttacttcattaaaacctctttgtttcacaaagaaaaatatgaagaaagtttttctccattgctgagagctgggaatctagacttaaagttctgagtccccttggatccttaaaacaatctgtaatctctattgaatccagaagttagaaatctaaacagattataacagccagactttggaaatatttgtatgctacctacattttcaattttttttttttgagacggagtctcactctgtcgcccaggctggagtgcagtggcatgatcttggctcaccacaacctccgcctcccaggttcaatcaattctcctgcctcagcctcctgagtagctgggattataggcatgcgccaccacacccggctaatttttttttgtatttttagtagagacagggtttcaccgtattggccaggctggtctcaaactcctgaccttgtgatccgcctgccttggcctcccagagtgctgggattacaggtgtgagtcacctcgcccagcctgtatgctacctaccttttcatattgctaattgaagttattctttcttcccatagattaaacccaacctcactaaacttcgcaaaatggcccaggcctggcgtctctttggaaaagcagagtgtgatacaaggcagagcctgcagcaatccatgcctccctgtgagccaccatgagaacagaatcactggtctaaaaggaacaaagggatgttcactgtatgcctctgagcagagagcagcagcagcaggtaccagcacggccctgactgaatcagcccagtgtccctgagcagcttagacagcagggctctctgtatcagtctttcttgagcagatgattcccctagttgagtagccagatgaaattcaagcctaaagacaattcattcatttgcatccatgggcacagaaggttgctatatagtatctaccttttgctacttatttaatgataaaatttaatgacagtttgattggttgcttggtttgttatttgaagggtgtgatttttgtttttgtacagttttttttcaagcttcacatttgcgtgtatctaattcagctgatgctcaagtccaaggggtagtctgccttcccaggctgcccccagggtttctgcactggtcccctcttttcccttcagtcttcttcacttccctatgctgctgcttcatgtgctacatctcagacttaaagagtttctctactacagtgaaaacattctctagggtctttcatcaggcctttagttattttagggataaaaactattgataaaaaggacaaggatagaacagagaaaatttaaagtcctgttccgggttttttgttatgttttctttaaaaactcagagactgatgttcaatatcccaaaccagtaaaatggtgaaaatactatgagcttgttttttaaaatatgattttttttggtactttataaa

SEQ ID NO: 610 - DNA, 4747 bp, Homo sapiens
ttttgagacagagtcttgctctgttgcctaggctaaagtgcagtagtgcgatctcggctcactgcaacctccacttcctgggttcaagcaattctcctgcctcagcctcctgagtagctgggattacaggcacccaccactgcgcccggctaatttttgtatttttaatagacggcgtttcaccgtcttggccaggctgatctcgaactcctgacctcatgatccccccacctcggcctcccaaagtgctgggattacaggtgtgagctaccacgcctggtcctcaggtagttctttatagcaacacgaaatggtctaagccactatccttatgccagtaccacactgtctcagttactgcagctttgtagtaagttttgaaattgggaagtgtgaatccttcaactttgtttttccttttcaagattatttctagctatcctgggtcccttatgtttccatgtaaattttagtatcaatttttcgatttctgcaaaagcactgggattttgatagagattgagttgaatctgtagatcaattgggtagtaatatcatcttaacaatgttaagtatttcaatacatcagtaagggatgtctttccatttatttagatactctttaatttctttcaagaatgttttgtagatttccatatatgtcgtgcaattcttttgttaaatttattcctagacactctatctttttgatgctattataaatggaattgtttcctaatttcattttcagtttttcattgctagtgtatagaaatacaattgatttttgtatatcaatcttatatcctacaaccttgtgagactgttaattagctctagtgtgtgcctgtgtatgtttcttaggactttttgtatacaagatatgtcatctacaaatagaggtagttctgctttttcctttccaatctgaatgccttttctttctcctgctgtggatagaccctcaagtataatattgagtagagtggtaacagcagacatccttgtcttgttcctgatcttcgtgggaacgtttttaatctttcaccattaagtatgatgttagcagtgggtttttcacagattccctttatcaggttgaggaagtttccttctgttcctagtttgttgagtgttttgatcataaaagaggtattggtttttgtcaaatgcttttttgccatctattgagatgatcatatagcttttgttttattaatatggtgtattaaattgattacttcttgtatattgaaccaaccttgaaagaaatcctagtttgtcatggtatacaattctttttctgtgttgcctgatttggtttgctagtattttgctgatgatttttgcatctctgttcataagagatattggtctatggttttttggttgttttttctcgtgacagctttgtttttgggaggctgaggaaggaggatcatttgagcctgggaggttaaggctgcaataagctgtgactgtgccaccatccttcagaaaaaaaaaagaaaaaggaaaagaggtattgacaattcacattcatgtttcaaagattccttccaggttagaatttgaattttaagtaccacagtcccaggaatgagacacttatttttcatttttattttttagctttagttttagtatgaggataatgctggcttaataaaatgtgttgggaagtgtttcctcttcttttttttaacccttaattcttggtttggatcttcttctattttttggaagagtttgtgaagggttggtaaaggatttttttttaaacatttggtagaatttacccatgaagccatctggtcctgggctttttatctgtgggaagtttttgattacaaattccatctcttggtataggtctattcagactttctatttcttcttgattcagttttggttgtttgtctttctaggtattaggtttgttttcatccaaaaaaatttaatctaattttttggcatataattgttcatagaattcccttttatcctttttatctttgtaaggttggtggtaatgtctccttttatttctgattttagtaatttgaggctttcatccgtttttctttatcagtctagctaaaggttgtcaattttgttgatcctgtcaaagaagcaacttttgttttattgattttctctattcttctgctttccattaatttctgctctaatctttatttccttctttctgctcattttgaattcagtttgctcttctttttctagtatcctaaggtggaaatcttgattattgatttgaagagagtttctttttagattgcaactagaggtggtgattacagtccttgaaatgttgtcagatgattgtttaagcaaaaatatggttatgaggtagaattcactttttggaattttcttaggggagaaaaaccctgttggtgcaatagatattcaaaactgaacatgagtcaataacattatgtcatcattaaaaaaataagaacagagttgagcacacaaatgaaaccagtaggaaacgcccattctcaacactggtcaaattttggagtgttctgttcaactctcaagagttcagataaggccaggtgcagtggctcatgcctgtaatcccagcactttgggaggccgaggcaggcggatcatgaggtcaggagatcgagaccatcctggctaacacagtgaaaccccatctctactaaaaatacaaaaaaattagccgggagtggttgcgggcgcctgtggtcccagctactggggaggctgaggcaggagaatggcataaacctgggaggcggagcttgcagtgagctgagatcacgccactgcactccagtctgggcgacagagcgagactccgtctcaaaaaaaaaaaaaaaaaaaaaaaaagagttcagataaatcacattgcaaatttttaaagatttatttgactgtgacaacctcctgtttaaaactgcacattcttacagctatttaccatataagataactcttaagaactggagatagtcagctcccctgggttaatttgaagcagaagagggcagttgttatactgccctgtcagttggatgcggagtcttactcaaaattcattctcagcattcttcttttatggtatcttctttggcacttagcagcgcatcaggtaggcatcttctatttttcttcattccttaatttcctttgtatccctcaaatggttatttatttggctggagtctgttttgttcattaagcaaacatgtctttgctttgaacatgtctttgatttgatggatacttaaattcctcatcaaacattttgttgctatgcataacgttttctttggccaactccagcaatttcccacattttgacatgcaatcatgttaactcccattttcttttgtaatccaacatcttctatttagataattactttaacaatcaatgacttaatattctaatcataaatttatacaaaaataaaattacctccaaaacattgctacctttcctaaacattcagtcttgccacagtttaataaaaggaaagaacattaaaaaggataagacactgtaatgattagatgctttttataagcctaaaggcattgtgattatttagacagaagagaagaaagtgaagtgaaaacctgatagttatgtagtctcatggtttgctgttgagaggctgaacaccagctgctttccttttctaggaagataataaagtgggctttggctacaacataaagatgttgggttagacagtttcactacagtaagaacaacgggatgagttgcccaggaaattgtgaaatactttctaatgatctttaaagatataatgaacactaattcatctggatttgtttacgtgtggtcctggttaaaggcaaagggaaggatcagataacttcatgttttttccatttaacatacccaatagattcttgattaggggaagggaaaatgagcaagatacagtccagtattctaaaaacaatcagccttaggggatcatttcaaaagcatctgttttggacttaagtctttgatacttaaccaaattgactacacagtgaaaaattctagtgcctgggttttatagggtagaagaaagacatgcagtcaagtggccaatacttcatgtgaagataagcaatgagatccttcttgctgtctttcttttgactgttctgggcaatatcaaattagtttcagtggcttgattctaggccaagattctggcaacagattgtagtcttaccttgttttcttcaatctcactggatctctctctctttttaccccccttaggctgagggtaaaaagctgggattggtaggctgggtccagaacactgaccggggcacagtgcaaggacaattgcaaggtcccatctccaaggtgcgtcatatgcaggaatggcttgaaacaagaggaagtcctaaatcacacatcgacaaagcaaacttcaacaatgaaaaagtcatcttgaagttggattactcagacttccaaattgtaaaataatggcctgaatttaagttttctaagataaactcagtggtttggtttttattattaatagagatagaactattgtgtgttaatattagcattagtcaataagttattttaatgtcagatttttgaatgttattatatattacctgtatgatggaaggattaccactgtacacaaatctaatcaataaaaacgttagaaccttctgcttagagtacttttaaaaa

SEQ ID NO: 611 - DNA, 1091 bp, Homo sapiens
gccagctggtaatgtttattgcaactggggtgctatacaattagtaagatgatgcaatgagaatttctacttttgtatttcctgaccagcctgctcaaagtggcttttatatcaattgaatgattttcctcattttttaatacaggaaaccaattcgtgctcatggaagaaaagttcctttgccagcagccttgaagtgaatcttacaggagcaatgaaagtattgcattcattagcgtctgccccagagaaggttcagagaaaaccttcacttgttttcaaggggatccttgtagatttacgtaattggaatcctgaagaacaggccctactgtctaaaaaatggcttttattcttctaaatacatataaacggatgttttatagatgggaagacatgaccttagaaaggagagagttttcagaggatttgccaggctgtcaggggctctgcctccaggcccagtgtggcagtgtggcctcagggcctccgcctccctgcttgagggctgcatggaggccaactgtcctgggagttgtaaaaatcttttaaggccagaccaatttgagggattttaaaaagtgtctcagtgcctcttatgatttcagaaggttttgctatatgtaatcccaactactgttttcttgagagtagcagaggattagaaaaagtcctccataaattatgtaaccggccttcctgactagcctgactcaagcaatgtaagagataattattctgttttcataatttataagtgtgggggcatgcctcagcataaaaacaacctattagggaaaaatatctaatagattacctttatcgcctgttagggttttatgttgtttttaactcagatgccataagaacaaagatacatgtaatttataatagtaatcattaatacctatattgtgctttaaggtttacaaaataatttttctcatactttatcttagtttagtttcttgacagtccatgaggtaaggtggtagctttatcaccattttacaaagtgggaaacgaaggttcctcttaggaacctagttgtcacctttgtataataaaacttcgaagctcggagctgttaa

SEQ ID NO: 612 - DNA, 1090 bp, Homo sapiens
gccagctggtaatgtttattgcaactggggtgctatacaattagtaagatgatgcaatgagaatttctacttttgtatttcctgaccagcctgctcaaagtggcttttatatcaattgaatgattttcctcattttttaatacaggaaaccaattcgtgctcatggaagaaaagttcctttgccagcagccttgaagtgaatcttacaggagcaatgaaagtattgcattcattagcgtctgccccagagaaggttcagagaaaacttcacttgttttcaaggggatccttgtagatttacgtaattggaatcctgaagaacaggccctactgtctaaaaaatggcttttattcttctaaatacatataaacggatgttttatagatgggaagacatgaccttagaaaggagagagttttcagaggatttgccaggctgtcaggggctctgcctccaggcccagtgtggcagtgtggcctcagggcctccgcctccctgcttgagggctgcatggaggccaactgtcctgggagttgtaaaaatcttttaaggccagaccaatttgagggattttaaaaagtgtctcagtgcctcttatgatttcagaaggttttgctatatgtaatcccaactactgttttcttgagagtagcagaggattagaaaaagtcctccataaattatgtaaccggccttcctgactagcctgactcaagcaatgtaagagataattattctgttttcataatttataagtgtgggggcatgcctcagcataaaaacaacctattagggaaaaacatctaatagattacctttatcgcctgttagggttttatgttgtttttaactcagatgccataagaacaaagatacatgtaatttataatagtaatcattaatacctatattgtgctttaaggtttacaaaataatttttctcatactttatcttagtttagtttcttgacagtccatgaggtaaggtggtagctttatcaccattttacaaagtgggaaacgaaggttcctcttaggaacctagttgtcacctttgtataataaaacttcgaagctcggagctgttaa

SEQ ID NO: 613 - DNA, 269 bp, Homo sapiens
cactttgggaggccgaggcgggcagatcacctgaggtccggagttcgagaccagcctgaccaacatggagaaacccccgtctctactaaaaatacaaaattagccgagtgtggtggcgcatgcctgtaatcctagctactcgggaggctgaggcaggagaatcacttgaaccctggaggcggaggttgcagtaagctgagatcgcaccactgaattccagcctgggcaacaagagctaaactccgtctcaaaaaaaaaaaaaaaaaaaa

SEQ ID NO: 614 - DNA, 649 bp, Homo sapiens
aacttgcagtgccacagacaagcaccagagggatcgagagattacaagcaactgaaaagaaactggcagacctctctaattgggacattccatgtacaagcccagagaagattcatccccagaaaaggtttgagaggccccagaatctctagctgagctgattggtgaagttcttctcctgtaccaagccagtccataaagactgggagaggtggctgttttttcagataccccaaatcccagcaaaaaaataatgagacatatgaagaaacagagaaatatggcccaattaatggaacaaaataaatctccagaatttgaccctagagaaacagagataaatgaattatctgacaaagaattcaaaatgatcatcttaaagaagcttagtatgctgtgagagaacagagatagtcaagcaaatgaaatcagaaaaaatgcaataacaagaatatcaacaacaagacagaactataaaaaaagaaccatacaaattctgcatctgagaaataactgaattgaaaaattaactagagggattaaaaagctgacccagtcatgcagaagaatcgtcaaactcaacagctcatttaaattcatcaaatcagaaaaaaaaaatgaaaagtaaagcctaagggatttatggcac

SEQ ID NO: 615 - DNA, 10093 bp, Homo sapiens
ggctaaacgcaaccaggaacacattggcaaacttttgcgcctgcgcccaccgggcgtgcacctgtaggctgaagtcgcgcatgcgctagatgggaacgttgtttcttctcccctaccccttttctgtggggctgttttagggacagactgcttccgggtcgaagggcttgcttccggagagcgggaaggctaaaacgcggtagctaaactgcagccaactttggttgtgtgtggaaaaggctttagccatggacaggtcagtactgatggtggcagctgagcccgaagtcttgcccgtctcgcctgttggcgaaacgaaataggtgaaactagactcccagaagaagccaaggaggtcccgggtgcttcccctaaggctccttccccatgccgggaaatttggccacaaatggggaaaaagccgcttggcgtgcgtcggggtggggtacagatcataatagtcccttactttcccactacgttctgcgatctattcggcgctttggggcagcaacactgttcgctcctggggtgggcggggtaggtagcgcggcgttcgaaatgctaagtgaccagcctgagatcacaaagccagtcagtgaagatactgggatctcagcccagactttctgattacaagtgccagcatcagattctgagttccctctatgatctgggtactgtgctagccgcctacaacaaagatcagttattcaagatccttcccctcggggaattagttgtgtaatggagacaaccaagcagtgtaaagtggtaagtgtttgggggcgattaagtctccttgtcactgtaactatcaggaagacccctcaaagaaggtaactttctagctggtctttgaataataagagtacattattcgtactccaaacattgagtacctactatgtgactgccattgttctaaaggcgttgaatatatattattagcttatttaatcttcagaacaagaaaaatcctatgagatgggtactgttatccttttttcatatataacactgagactaaaagaggttaaggaacttgctgaaagttcggaagctaataaatacaagaaccaaattgccaacctgcatctgtgtgtctccagcctacctgaggctctttgaggagtaagtagttgttgaccaggtgctcaagggggcaaatgtaggtctttgtaaaagaagcatattcagaggtgctaggatatgaaaaaaaagtacgtgtagctcagtggtcacatgcagtatacgtttaaagtgatgtttgtggctgaatagaagactgaacccctaaactggggtcacattgtaaatatcattttaggaaatttttacttctatagaccagagagctatctgaaggttttttttttgtttttaattttaattgttaaacgtttaaaattgtttctatgtggttgtttcccatactttcctgctgaaggaatatctgaaggttttaagtggaggaaaagcatattagattcttgtcttaaacacaggccttttagtccgcacaatttagtttctagacctttgagtgaaactgacagggagtgttgtgatgggacaggagacctcctgggttgaaataacttgaagggtcattttgctccaatttaccacaattcttttacttacccttctatctcacaagctctgtttgttgttgttgttgcaagctctgtttgttgttgttgttgtttgtttgttttttaatagtacccatggtttaaagcattttggagactgcagaaaatcttttaagagagaattcctgcagttaggtaactcctcaatccaacaagggaaataagattcactttcatgaagcaattatctaaaacagtgttataatatagattccaagtgttgaaataattccttaggagaaaataacatagtgagtactagaaagtcagagaagtctttgtgcaggtaagatttgagtaaggctttgaagaataagcaggatttggagccaggagtgcgttctcaacaaaagatctaagacttggctactagaatgactataccttaacttactcagggtcctttactccagctgtgatgataaaattctttataaatgctatattctcgtttcacttatataagcttgattatactactttaggagtggctttggagagatatcatcccctgtaatccgggaggcagaggtgacacggactgcacgaaaacagagtgctcagaaaagagttttacgtatcctttgcgatttaagcatcattataaaaattgtaacatgtttggaatcagtgttgtagaattttctttttataagagtattaaatggtagctataataaaatcctgtagaaactttttttcactccacagagctgtcatttggtaaatataatgcaaaaatttaatgagatcgtatttccctaaaaataaagatatttcttactgctgacagcttctgctgagattagatttctttttattatttgaaaactgactaaaaacatttagttcagtgtgtagttatctaagactgacatctgatcatttaaatggcagaagcaatgaattatttaccctttgcattgaaaaatggtagccctaaaatacttgttcttgaaaaatgtattcacataatttgtgtagtaaaaagatggttaattctcattttagtgatctcttttctacatggaaaacttttcttaactcgttgtacagttcaggcatctcaagatgaaaattttggtaatactacaccaagaaaccaggttatccctcgaactcctagctcatttcgacagccttgtaagattttttgcttttaaagcatttaataataacggtaattataatagcaactaacatttattgtaacataattagtatagtatttggttacgatatcaataagcactaataataatgattgcagttattattcgtttgaactcttgccatgtacaaggtactgtactttccataaacacacggtaactatgacatgggtattgttggccctgttttaccaaaactgaaagtgagacttagagaagttaactaatatatacaataagtatgtaaataggctggatgcagtggcccatgcctataatctcaacactttgggaggccaaggtgggtggatcacttaaggccaggagttcaagactagcttggccaacatggcgaaaccctatctctactaaaaatacaaaaattagctggcgtggtggcacatgcctgtaatcccagctactccggagggtgaggcaggagaattgcttgaacccggaaggcagaggttgcagtgagctgagattgtgccactgtactccagctggggcgacagagcaaaaaaaaaaaaatcccagttccattatttacatactctttttttgttctgagacagaaaaaaaagagtatgtaaataatggaactgggattcaaacaatgatctgtttactccaaagtttatgcccactacactgcactgcctcagtatgccttataaaattaaaatatgaagaatccgttgactgattagtgtctttaactgctcagttattctataatgaaagcatctgtaattgcagtaaaatgtttcctgttaggctcagtagtacctacagctcaaatttagaaaaataagttaaatccttgtatcatggaaatgttaacatttaaagtatttatttggttagagtctaaataatggaaaactgaaaaatttattcttcattgtttgtttgcttactttgttttgataatgaatgctcacgcactttaggttctttctaccaaccttttgtttatagttaccccaacaagccgaagcttactaaggcagccagatatttcctgcattcttggaacaggagggaagtcgccccgacttacgcagtcttcagggttctttggaaatctctccatggtatgtagaaaaatagggctaagaactccttttgggtcgagtgtggtggctcacatctgtaatctcagcactccctgaactcctgacctcaagtgattctcccgccttggcctcccagaagtcaggagtttgagactagcctgcttagcatgataaaaccctgtctctactaacaataaaaaaattagctgggagtggtggcttacgcctgtaatcctagctgctcgggaggctgaggtgtgagaattgcttgaacccaggaggcagaggttgcagtgacctgtgattgcaaaagaaaaaaaaaagagaaaaaagaacttctccctttttataaaaatatgatatttgatgtaaaagtcttttaacaaatattgagtcagaatcatcataacagtaactttaggttatatggattgaaataattagacagtaaaaaaactgaaaaccttatgcatctgatatcacagatggaaactgtgacaccagcaacctttagatgaaaataagatgttttaatctgtcagtttgctgaccagaagaagtacatgctgtggttggttgctgatggctataaaatctgatccctgttttgaagcatacaagagtaggaatcagaggttaacagatgaagaatatcttaaggaagagataaaatgtattaaaggggataaaagagaaaattggaaaaagtaggtgagatactctttaggaatcactatggaacagtattaaaaatagcaaaagaaatgttatgtaagctgtgatgcagaatgacttcacctaagtattaaaaatacactatagtagccgggcatggtggctcacatctgtaatcccagcattttgggaggctgaggcaggtggatcacatgaggccaggaatttgagaccagcctggccaacatggtgaaaccccatacctaccaaaaatacaaaaattagccaggcgtggtggcacgtgcctgtagtcccagctacttgggaggctgaagtgggaagatggcttgagcctgagaggcaaaggttgcgttgagccatgatcgtgccactgaactccagcctgggcaacagatccagaccttatctcaagaagggaaaaaaaaaaaaaaagacgcatacatacatataatttttagaaaccttatttgtttttaaagtatccactcagtgacaataactccatcacttttctgtatttttacttttttgtttttttttaaggttactaatctggatgacagtaactgggcagctgcattttcatcacagcgttccgggctgttcacaaacacagagccccacagtataacagaagatgtaactatcagtgctgttatgttacgtgaggatgatcctggagaagctggtaaaatggcattgagctttgtgacaagtagcttttcactttagcaagatgaaggaaaccatttcttcctgtttctgaacgtcattatgtttttcttttctttctttctgtctttttttcttgagagagtagcttaaacaacagatttttgtgtgtgtgttttttgagacaagagtctcactctgttgccgggcgcggtggctcatgcctataatcctagcactttgagaggccgaggcgggcagatcacgaggtcaggagttcaagaccagcctggccaacatggtgaaacctcgtctctactaaaaatacaaaaattagttgggtatggtggtgcacacctgtaatcccagctacttgagaggctgaggcaggagaatcgcttgaacccgggaggcagagtttgcagtgagctgagatcgcaccattgcactccagcctgggctacagagcaagactccgtctaaaaaaaaaaaacaaaaaaaaaaacagtcactctgtcacccaggctaaatgcagaaatgcagtggcacaatcatggctcactgcagccttaacctcccaggcttaagcaattctgcagcctcagcctcctgaatagttgggactgcaggcatgtaccaccatgcctagctaatttttttttttttttttttgagatggagtctcgctctgtcacccagactggagtggagtgatgggatcttggttcactgcaacctccgcctcccaggtttaaatgattctcctgcctcagtctccagagtagctgggattataggcgtctgctaccacacccggctaatttttgtatttttagtagaaacggggttttgccatgttggccaggcttgtctcaaactcctgaccatgggtgatccacccgccttggcctcccaaagtgctgggattacaggtgtgagccactgcgcctggccgccagctaattttttatttatttatttatttatttttttttttttttagacggagtctcactctgttgcccagactggagtgcagtggtgcaatctcggctcactgcaacctctacctgctgtattcaagtgattctcctgcctcagtctcctgagtagctgagattacaggtgcccaccaccacgcctggctaatttttgtatttttagtagagagaggtttcaccattttggccaggctgatctcgaactcctgacctcaagtgatccgtcctcctcagcctcccaaagtcctgagattacaggcgtaagccactgtgcccagcctaattttttatttctttatagagacagggtctacaaagaccagcccaggctggtctcaaactcctggacacaagtgatcctaccgcctcagcctctcaaagtgctgggattataggcaacaacataaatttattttctcacaattctggagcctagatgtctgagttaaaggtcttggcagggttggttttctctgaagcctcttctcttggcttacagatggctgtcttcctcctgtgtcttcatctggtcttctgtctataatatatttttccttaagctaattagttgtggttatggcaatggtatttgatacagtatcactagaaggttgagaacctcaccttggttctcagtctgagcagcatcttgccattttatcttttaatgtaaatagcagcctgttacgttattagacaagtctcatattgtaatttttttcttatttgtgctgttgaaagagcatctctttctttaggtttagttcttaatctaacattgttgatgtgttttgttttctcctggaccgtaatgctgttattttttttcagatagtgttatgaccactgtacaagcattaactcatgtaatccttatggtggtccattaaatagttacaataattattcccattttagagaaaaggaaactactgctcaaagtggttaagtaacttacctcaaaccacctggctaggaagtagtggtaccaggatttgaaactaagcagtttagctccagagccctgctcttaacactttggtaactactactttcttgtagtatctgtcaaaaacaggtactcgtattaagtgactcaaaatactttctacttaggccaagtgcctgtattttcccagagtggaacatgccatttagtatgtattataactttctccactactttgtaatggtgtgcttaaaatataattcagatatttttaaatctggctcaatttcttaagtaattgtttataaaataactagtatatctttgagatcttaaaagacctttaggtatcaaaagaaaaaatagataaattgggctacatcaaaattttaaacttttgtgcacgaaagaatacaatcagcaaagtgaaaaggcaacccacagaatgagagaaaatatttgcaaatcatatatctgcttaggggttaatatccaaaatgtataaaaactgctacaactcaacaacaaaaaaacaacccaatttaaaaatgagcaaagaaatagaatagacagaggctggacgcagtggctgatgcctgtaatcccagcaatttgggaggctgacgcgggtggatcacctgaggttgggagttcgagaccagcctgaccaatatggagaaaccctctccctactaaaaatacaaaattagctgggcatggtggcgaatgcctgtaatcgcagctactcgggagactgaggcaggagactcgcttgagcccgggaggcagaggttgcggtgagctgagatcatgccattgcacctccagcctgggcaacaagagcgaaacttcatctcaaaaaagaaagagagaaagaaagaaatagaatagacactgttctaaagaagattcacaaatgaccagtaagcacatgaaaatatactcaaatgtcactaatcattaggaaaatccaaatcagaactacagtgagttacaagatactgccttacacccgttagtgtggctactgaaaaacaaacaaaccaacaacaagaacaaaaacccagaaaataacaagtattgacaacaatgtggagaaattcaaatccttgtgcactattggttggaatgtaaaatagtacagctgctatggaaaacagtatggcagttcctcaaaaaattaaaaatagaattaccatatgatccagcaaacctgcctctgggtatatatccaaaagattggaaagcagagtctcaaagaaatatttgtacatgcatgttcatagcatgattcatagtagccaaaaggtagaagcaagccaagtacctgttgatagatgaatgggggaaacaaaatgtgatctatacatacagtggaatattattcagccaaatatgaaggacattctgacacatgctacaacatggatgaaccttgagaacattatgctaagtgaaataaaccagtcacaaaagggcaatactctatggttccacttacatgagatatttagaatagtcaacacatgtagggacagaaagtagatggatagttgtcaggggctggggtaagtggagagtggggagttaatgtttattaagtacagagtttcagtattacaagatgaaatagttctgtggatacatagtggtgatggtagcacaacaatgtgaatgtacttactgacactgaactatacacttaaaaatgattaagccagggatagtggctcatgcctttaatcctaccactttgggatgctgagacaggagttagcaagaccctgtctctacagactaataaaaaattagctgggcatggtggctggtatatacctatagtcccagctactggggaggctgaggtgggaggatcacttgaacctaggagtttgaggctatagtgagccatgattgcaccactgtactccagcctaggtgacagagcaagatccccctctcttaaaaaaaaaaaaaagaaaaatgattaagataaattttatattatgtgtatcttgccaattaaaaaaaattttgaggctgggtgcggtggctcacgcttataatcccaacactttgggaggccaaggtgggcggatcatgaggtcaggaaatcaagaccatcctggctaacacagtgaaacctcgtctctactaaaaatacaacaagttggctgggcatggtggcacgcacctgtagtcccagctacttgagaggctgaggcaggagcaccgcttgaacctgggaggtggaggttgcagtgagctgagattgcgccactgcactccagcctgggtgacagagtgagactctgtctcaatttttttttttttaatatagcagtgaatttataaaagacttgtagccatttaaattttcaaacaggctgggtgcggtggctcacgcctgtaatgccagcactttgggaggctgaggcgagcagatcacctgaggtcaggagtttgagaccagcctggccaatatggtgaaaccccatctctactaaaaatacaaaaattagccgggcatggtggtacatgcctgtaatcccagctagttgggagggtgaggcaggaggatcacttgaacctgggaggtggaggttgcagtgagctgagaccgtgccattgcactccaccctggacaacaagagtgaaactccatctcaaaaaataaataaacaaataaatacattttcaaacaaacggaattacctagaagtacgtcacttaacttttctttattccttttttttttttttgatgtgttctagcatccatgagtatgttttctgatttcctgcagtcttttctgaagcactcttcgagtacagtttttgatcttgtggaagagtatgaaaacatc

SEQ ID NO: 616 - DNA, 83 bp, Homo sapiens
tgttgcaacttcttcactttccccagatcttcaatggcagctttgttaaactcaacaaggcttcagttaacacgctgaggatt

SEQ ID NO: 617 - DNA, 396 bp, Homo sapiens
ttacttgctaaaaataattaaaccctccagctattgctctgtaactatttaccttaatgtgtaagcttcaaaacagatagataacgttgtaaattgttgtgttagaaatgatgagacagagtggaaagtaactgggggaggcagctctatctagagttgtcacagatgtcccagatgtatgtttgccagtttatagatgtaatttctcaaatttaaaagcaggatatttgaggataagttgcatgtgcataatcttcctcctgtgtaattaaggaatttgggggggcattatttttaattttactatattgtacttactagctttaatgttgttgtgtagagcagtgtcacctttagataaacagcatgtacttaaaacagaaggctatgtttaaa

SEQ ID NO: 618 - DNA, 322 bp, Homo sapiens
caaaatgtcatctgtggatggcagcatgggcatcactgggaacttgttagaatgcagaaccttaggagctactctgggggtcacagaattaagagtcttcattttcatgatatttccagttgatgtgcatgcacattagggtttgagagacactgatctagaattcactgtgcatttctgcttcccttctctctcccttctccccctgaccctccttttttttctgactagagtgcggtggtaccaccatagctcaaaggacctttgaactcctgggctcaagctatccttctgcctcagcctcccaagtagttagacctgc

SEQ ID NO: 619 - DNA, 401 bp, Homo sapiens
gatcaattagaacagagatgacaggcacaaagcactcgtattcttccctcactgtgtgtcctgaacatgcttgtttttcaacacagatctttcccctactgagctcagacttggtgctagttcctctgtcagcagggcacaccaggcagatatggtcaattacttaagatgcaactattttgaaatttctttttcccagagtagcatcatttactgctctcgttgtgagtcttgagttttgtcccacagcttccaagttctcagatcacatctctgagatgccatcagaccttcgcctcatcccaccatgcatggggccactctctaggccctcacaggcagttggtgaaatgagtgtgtgtttctccttgaggttttcatccacggctctcttccataga

SEQ ID NO: 620 - DNA, 316 bp, Homo sapiens
ttgttgttgttgttgttgttgttgtttttgagacggagtctcgatctgttgcccaggctggagtgcagtggcacgatctcggctcactgcaagctccgcctctcgggttcacgccattctcctgcctcagcctcccgagtagctgggactacaggcgcccaccaccacgcccggctaatttttttgtatttttagtagaggtggggtttcaccatgttagccaggatggtctcgatctcctgacctcgtgatccgcccgcctcagcctcccaaagtgctgggattaaggtgtgagccaccgcgcccggccggcagc

SEQ ID NO: 621 - DNA, 706 bp, Homo sapiens
cagtaataaaagattgttattgtcttcttaactaacttttcacatgattatcttttccacaatctcagaaatccaggaattgaaagaatctcaaaagtcttccactctatttttatggggaagtaggagaccaagaaaactgttttacctagaattatacaactgagatcaatcgtcattatttttaaaggatcttgaaactttataagattaaaagggatgccaatggtgtggagtaaaaagatcctggacttaggagttaggcatcggccgggagctgtggctcatgcctgtgatcccagcactctgggagacctaagcaggtggatcacttgaggccaggagttcaagaccagcctggccaacagggagaaacctcatctccatgaaaaatgtaaaaattagccagatgtgatggtataagttcgaattctgggttgctcgttccctaggtaattgagttatctaatctcctgagcccaaatttctccagatgtaaaatgtgaattttaatgtccagagttgcagtaatgtcatgagtataacattcattcagttattttttgcaactattatatataaggactttattagatgtcagaatttgagtatatgagacatagtcctcaagaagctcgtaagtccaattgaggggatgcgattttttaaaaaatacaaggtgagaagtgctttaataacgttttca

SEQ ID NO: 622 - DNA, 1251 bp, Homo sapiens
aagataataaaatagaacatgaagggctgtcagtcagtgtaggtatttccatcccctcacttttcaagtgaggtcacggaggctcagagcgataaggagacttgtccaaggccacacaccggctggtgctcaagccgggacttgaacccacgcagtctgactctagagcccaagctcctaactatgacatcctatttgatacactgttttactggagaaacagatcatttgacagacattctttctgttagcaatttgacaactctttccccagttgtctgtactgaacctggcgctgtgctccgtaatggtgacctagctgtgaataagatagaatcaccttaaactcagaggggtaatgttctgttggggagggagaacctagttttgcatgctaagtagaatgatgaatgaagtatttacaaagggagcatgatgactgatatgattcattggtattatgtattaagagcctatatcatttcactcattcaaagacttagtgaattaagaatagaagcatgggaacaagtaaagatattgctcttgcagaacattttccactgaaagctcatcatattttcctcttttgtgaggataaagaaaaagtattatttctacatggaaatttgatgtaatacatttcaaccctaaaggcttttaatgattgctggaatctctaaaacccacttatgaacttctcctttaggaggcaggactcagaataacaatagtaccacttaaaaaaaaaaaagcaaaaccagcatgccaggatgtttctttaaagaagattaatgctaagcactgcatttctctatcataatgtatcaatagttgcagtgcctcccactgccccatccccctccacaccagcttttgtgtgagtccaggcaacctataggcagaaggcaattccatttattattgaggggactctccaggcagttgttccagacctgtgaagccagcaggcagagcggcctgagagggggtggggagcaccgggcgagggaggtggggaagggccacattatgttccagatgactgagtaacgatttatatatcactcgccttttttacatgaagaagaaaagtaataacagcccaaacccaggcatttgaaacagtcagctgtccgatgaataatgggataggtgggaaggagcgctctgattggatgtcttaatgagcacatttcgcacagagtttgggctgcagttccccttgacctttgccctttattgaccaaa

SEQ ID NO: 623 - DNA, 405 bp, Homo sapiens
tggggaattttgaatgactgataatttgctgaattagtagctgttgtgatcagtgaaagagttttagtacacatttttacctaaacattaaaaaaagaaatacaaaatccatggctgggagcagtggctcacgcctgtaatcccagcagtttaggaggccgaggtaggggggggtcacaaggtcaggagttcaagaccagcctggcccacatggtgaaatcccatctctactaaaaatacaaaagttagccagacgtggtggtgggcgcctataatcccagctactcgggaggctgagccaggagaatcgcttgaacccaggaggcggaggttgcagtgagccgagatcatgccacagcactccagcctgggtgacagagcaagactcccctctaggaaaagaaa

SEQ ID NO: 624 - DNA, 529 bp, Homo sapiens
ctaccacacctggcccagttaattttttgatgagtgaatggtttcacaaggtaggtgttgtttctgtgttggcttccttgatcaagataaggaaattcatgacacttttcccttgaaaacaattatgttcaaaggaaaagagctggaatttggcagaatctgaatttgaattcacatttgtctgattatagagcttcttaaccttttttgtgttatggatccttttggcagtctggtgaagcctatagaccccatctgagcataacattttaaaatgcatacgtggccgggtatggtggcttacgcctgtaatcccagcactttgggaggccaaggtgggtggatcacctgaggtcaggagtttgagaccagcctggccaattagctgggcgtgatggtgtgtgcctgtaatcccagctcctcggaaggctgaggcaggaaaatcccttgaacctggaggttgccatgagctgagattgcgccactgcactgcagactgggccacagagcaagactctgtctcaaaaaa

SEQ ID NO: 625 - DNA, 529 bp, Homo sapiens
ctaccacacctggcccagttaattttttgatgagtgaatggtttcacaaggtaggtgttgtttctgtgttggcttccttgatcaagataaggaaattcatgacacttttcccttgaaaacaattatgttcaaaggaaaagagctggaatttggcagaatctgaatttgaattcacatttgtctgattatagagcttcttaaccttttttgtgttatggatccttttggcagtctggtgaagcctatagaccccatctgagcataacattttaaaatgcatacgtggccgggtatggtggcttacgcctgtaatcccagcactttgggaggccaaggtgggtggatcacctgaggtcaggagtttgagaccagcctggccaattagctgggcgtgatggtgtgtgcctgtaatcccagcacctcggaaggctgaggcaggaaaatcccttgaacctggaggttgccatgagctgagattgcgccactgcactgcagactgggccacagagcaagactctgtctcaaaaaa

SEQ ID NO: 626 - DNA, 529 bp, Homo sapiens; identical to SEQ ID NO: 625

SEQ ID NO: 627 - DNA, 290 bp, Homo sapiens
tggaattttaggcatttttcttaagtaagaggagagtgacgtcctgttggaattgtggggtagaggatattctgggcacttctaaaggggtggagaaacctgaatgtcctgggatgggaaccctaagggtgtagatttgtaaaaattgctgcagtcagttgccatgaggactgggtatctgggctagagacaggtgggcgacatcagaaagctgtgagtggatatcctggaagaccactgagaggaggagccaggaatggcaccagacatttctgaaggtggggggccca

SEQ ID NO: 628 - DNA, 290 bp, Homo sapiens; identical to SEQ ID NO: 627

SEQ ID NO: 629 - DNA, 290 bp, Homo sapiens; identical to SEQ ID NO: 627

SEQ ID NO: 630 - DNA, 988 bp, Homo sapiens
ttctgagtatgataaactaaggacatgccttaagtctaagaaaatctgtttactgcaggcttttctgcacaaattttcctttatcatcaaggttgctatagccatccctctttcggattccttttcttctttaaaattagaggctttgctttacactgttatttttaaatggctggatacctgccatagatctaataattggttgtaaaaatccagacaaacatcaatttttaattcttaatttttaatcttgtttgaaacaaacatgtaaactaaaataaaaacttaataaagccaggttcaaatcttgcctgttttagtatataagtcaaatttttattaaattaacttcagatcctattaattatgaaagcaagaggttatatttctaatgaatactaagatcttattagaaattccttctccatcactttgtttttctcttcattagatatacccgcacaaatgacctaaaattcaacccactttgaaaataaattttcaaggcttagtgaaaaaagcctaatttctgtagccactggcctgtttctagagccatcgttgactgatggcttataaagcctttttatacagcactgacattttaaagatactggccagtctgaactttccatctggcgtgcttgatttcctttgtcccactttcccatagtgacttattctgtccttgagctctaaaactactttgatttaatttaggcctgggggtgtgaagacatggtgaaatttatttaaacaagagacgatagtaatgcctccaacagtgcatagtaataggaaagcaaataactgacttcctggcatttatttgtgtaataacttcaccaccaagtgcaaccagagaggtattccagaactttccatgcaattacataaaactagcaagagctagtcagcacttgtaaaatcaagtgggagataaaggaaattattttatctcaggccaaaaaaaaaaaaaaaaaaaaaa

SEQ ID NO: 631 - DNA, 994 bp, Homo sapiens
ttctgagtatgataaactaaggacatgccttaagtctaagaaaatctgtttactgcaggcttttctgcacaaattttcctttatcatcaaggttgctatagccatccctctttcggattccttttcttctttaaaattagaggctttgctttacactgttatttttaaatggctggatacctgccatagatctaataattggttgtaaaaatccagacaaacatcaatttttaattcttaatttttaatcttgtttgaaacaaacatgtaaactaaaataaaaacttaataaagccaggttcaaatcttgcctgttttagtatataagtcaaatttttattaaattaacttcagatcctattaattatgaaagcaagaggttatatttctaatgaatactaagatcttattagaaattccttctccatcactttgtttttctcttcattagatatacccgcacaaatgacctaaaattcaacccactttgaaaataaattttcaaggcttagtgaaaaaagcctaatttctgtagccactggcctgtttctagagccatcgttgactgatggcttataaagcctttttatacagcactgacattttaaagatactggccagtctgaactttccatctggcgtgcttgatttcctttgtcccactttcccatagtgacttattctgtccttgagctctaaaactactttgatttaatttaggcctgggggtgtgaagacatggtgaaatttatttaaacaagagacgatagtaatgcctccaacagtgcatagtaataggaaagcaaataactgacttcctggcatttatttgtgtaataacttcaccaccaagtgcaaccagagaggtattccagaactttccatgcaattacataaaactagcaagagctagtcagcacttgtaaaatcaagtgggagataaaggaaattattttatctcaggccaaaaaaaaaaaaaaaaaaaaaaaccaac

SEQ ID NO: 632 - DNA, 601 bp, Homo sapiens
aggtgatgaaatacacattgaactagaggttacgaagatagtcagggctggagatgtggatctgaagccacagaagccagtagaaagagtgagactggtacatttagagaggtgcggggaaaagaaagtggctggagaaggagaccacgatataaatcagtcttaggagataaagaaaaatctttctgcacattggagatgacagatttgtaggccatgcttcagacacatacctatacatattcatgtttgtatacatattcatgtacatatttatatatgtattcctatatacattcatatgtattactgtgtgtgtttgtatatgtatcttattcatgagcatgcgctgttctcttatgctcacatatgtattcttgggagcctttcccacctcagcaagtggggagaggaagagtggggtaggcgtcagtctctccccagagcagctgattggggcaggttctgctccctgctgctgcagtttgagagcagtagagggaaaatggggtttactttgtgtacgtgtggttcaggccaacatgcagaattttatacccctcaaaatgcattcctccacagaagcctggcaactttaaat

SEQ ID NO: 633 - DNA, 601 bp, Homo sapiens
aggtgatgaaatacacattgaactagaggttacgaagatagtcagggctggagatgtggatctgaagccacagaagccagtagaaagagtgagactggtacatttagagaggtgcggggaaaagaaagtggctggagaaggagaccacgatataaatcagtcttaggagataaagaaaaatctttctgcacattggagatgacagatttgtaggccatgcttcagacacatacctatacatattcatgtttgtatacatattcatgtacatatttatatatgtattcctatatacattcatatgtattactgtgtgtgtttgtatatgtatcttattcatgagcatgcgctgttctcttatgctcacatatgtattcttgggagcctttcccacctcagcaagtggggagaggaagagtggggtaggcgtcagtctctccccagagcagctgattggggcaggttctgctccctgctgctgcagtttgagagcagtagagggaaaatggggtttactttgtgtacgtgtggttcaggccaacacgcagaattttatacccctcaaaatgcattcctccacagaagcctggcaactttaaat

SEQ ID NO: 634 - DNA, 515 bp, Homo sapiens
ctcagactgccagtgatatgaaattcacctgaaccctttacagttggtgacaattgttttaggaaaatatatgtgataagatgctgcaggtcctcataccagtgtcaactcagaatgtcgttcacatttcttctgagagtctccaattggccacattactgagagctttgtcataatgctttaagtcatttatcagctgaggtcactttgacttttgagattctaataaaattggcttgaacttttatcttataccctgtgggaattccaatgagcatttctggaggctttgttttcgtggtggatttttgttagagaactcttgatattccttgtttccgttgcttttctctcttctctcagagttagaaattagcttctttccacaatttccttccacacagctcacacagaccgtggaagtttagggagttggaggaagtttgcatcagagaaatttggaaggatgtttaacagcctgtttgtttgttggtttgtttgtttgtttgtttgtt

SEQ ID NO: 635 - DNA, 515 bp, Homo sapiens; identical to SEQ ID NO: 634

SEQ ID NO: 636 - DNA, 1072 bp, Homo sapiens
catccccggggaccttgcttacttctccctcccagcaccacttaagagaagaggaggtggcctccctctccccaacctcagagccctcaaagcccttgatagtgagcctgagcacttgttaggaggtgacttctacctggggtgtgctggggtccacatgtgccagtctctctgccctgctccccgtgagcggctctttatttgtggcccttgaggccccattgttgtggccaccaaaacctgaattggaagctgtgtgacaatgctggtccccctccctgcactgcttcctgctgggggcagaacaaagagagcgggcattgtctctggcataaatgaacctctatcaaaacaaacacccagagagaggggcagcctggttacagctgcctgtgtgagcctcgacagtgggcctcattcctcacaaagggagctttgaggcccggaagaggcctttccttgatgatcgagctgtgcacagggagcaaaccccaagccgactgcttgtctgtgccaccctcaaacaatgatttccccaaattggacagcctgggtttgtatccttgagcacggttttgggaagagcattctgcatgaggcattgtagctatgtgtatggagtataattctgttttcaggttgctctgccacagaggttaagaactccctcttccaaggtagacattgagaacagagacgaccacactgggttttcactgcagcttttaaacaggatgactcccagcccccatccccgtggctagcagcaagcagggactctgaaacactgcaagccaatggactgagcatcttacttttgctgtccgtgttttggtgttttgtaaacccatctggtaatgaccctgatgccccatgtcccagcaagggcataggtacctgccattgtgcaccaaagtccctttcctcatggccctggctgttctcctgcatggggtcatgtgtgtcccgttaccaagttgtggccccttttcaaccttgagtgccacatctgggctgttgtaggcatgggtagtacaagctgggtttgttactctaaaaatgaaagggagga

SEQ ID NO: 637 - DNA, 1072 bp, Homo sapiens; identical to SEQ ID NO: 636

SEQ ID NO: 638 - DNA, 383 bp, Homo sapiens
gataggaattgtgctaccaaaaatgaaaagtaaacgtaatatgtaatgttctactggtaattgtttccattttaggttgacaccgaactaatgatatttaaattgtagctgacttgaaacacagtgaaaaaatggtttcctgctgtttttttaaagctggattcagtaacatgaaggtaattaaaaatgtacagatctcagtaatagacagtcatatgttgcttaatgacagggatatgttctgagaaatgcattgttaggtaattggattttatcattatgccagcatcatacagcgtactttcacaaacttagttgatacagcctactacacacctagggtccatggtatagcctgttgctcgtaggctgcaaacccgtgg

SEQ ID NO: 639 - DNA, 383 bp, Homo sapiens; identical to SEQ ID NO: 638

SEQ ID NO: 640 - DNA, 584 bp, Homo sapiens
gcaacctaaggtaaaattttttaaccaaatttaacccattcccaatcagattgaataaatgcctagcagcttatgtgttgtgctaaaacacgatatattatctgccaataaaaaacagtattttgtatttatatagttttattaccaagaagcttactcagctttatgatttcccctttgtaatctgattaaccttcatagtatcttgaagtaatgtatagtgtagcaatcagacacttaggtagtgacttcgtgagctctgacaatgagtcaatataatgcaagaggctatgtatgaagtccaacctgggtgcgtccacaccacaccaagaggacaagttaaaattaccatatggccaaaaattaatattttctgacttatttttgtttaccattccaaccatagtactgtataaaatgtttgctattcattatagacccaggaatggaatattcctaatattaaaacaaaaatttcaacagctatagaaaatgaaagtgagtgtgagatagagatactggacataatgttctataggttttaaaagacttaagtagaagaaatggaaacaatgtctttactt

SEQ ID NO: 641 - DNA, 105 bp, Homo sapiens
atcccagcactttggggggccgaggcagatgggtcatgaggtcaggagatcgagaccatcctggctaacaaggtgaaatcccgtctctactaaaaatacaaaaaa

SEQ ID NO: 642 - DNA, 199 bp, Homo sapiens
gttgcccaggctggagtgcaatggcacgatctcagctcactgcaacctccgcctcctggattcaagtgattctcctgcctcagcctccccagtagctgggattataggcatgcgccaccacgcccggctaattttgtatttttagtataggcggggtttctccatgttggtcaggctggtctcaaactcccgacctcag

SEQ ID NO: 643 - DNA, 592 bp, Homo sapiens
  misc_feature (585): n equals a,t,g, or c
gtactgacatgtacataaggtatacacataaggatgtctatcatagcagtgtttttattaggaagatccaaacaaaacaaaatagaagtggaaagctcttaagtgttttgcagtattcggaggactagttaaattagggtacatctgtggaatagaatactttttccagttcttaagcagaatgtattagattggcttgcatgcatatggaaagctctttgaaacatattacgaataaaagcaagaaatagtatagcttgtggggtaagtgtccgtttgtgttttaacaaaatatataaactagaatttatacatgttgtctggaaggatgcacaggaaactgttgatggttatctctgggagcttgaagtgtgggatggataatgggctgttttaatcttatagtcccttttgaacagtttgaattctgtttattatgggcatgtacaattttcacaataaaaaacaaaggttttttgttttatgtgcattacttatatttttttcttggattttttccagatttctcttgcactttgttttgttgtgatgtttgggaactcaatgttattattatgctgcttntttggta

SEQ ID NO: 644 - DNA, 612 bp, Homo sapiens
gtactgacatgtacataaggtatacacataaggatgtctatcatagcagtgtttttattaggaagatccaaacaaaacaaaatagaagtggaaagctcttaagtgttttgcagtattcggaggactagttaaattagggtacatctgtggaatagaatactttttccagttcttaagcagaatgtattagattggcttgcatgcatatggaaagctctttgaaacatattacgaataaaagcaagaaatagtatagcttgtggggtaagtgtccgtttgtgttttaacaaaatatataaactagaatttatacatgttgtctggaaggatgcacaggaaactgttgatggttatctctgggagcttgaagtgtgggatggataatgggctgttttaatcttatagtcccttttgaacagtttgaattctgtttattatgggcatgtacaattttcacaataaaaaacaaaggttttttgttttatgtgcattacttatatttttttcttggattttttccagatttctcttgcactttgttttgttgtgatgtttgggaactcaatgttattattatgctgcttctttggtaattatttgggtaaatattcc

SEQ ID NO: 645 - DNA, 446 bp, Homo sapiens
tagttgatccattaacatttcatttgttgtttaccctaagagtcagtaatttttagctaaaggaaaatcttatgcctgtatgcaattctgaaaatgttatatacctcatggctcagagataaatcagatatgtcaaatcagtgatagacatttacatatggtgattcctttttcaactttaaaaagtcacgctttcacctaattgactttggataatagggctataccttgaagtcactgactatagacatgagcatgtggatggtatgtggaaagttgactgtttgctcaattttagatacttgagaatcttatcatttagaagaattttttggtacttgaatttatgtctgtaagtattaactgtgtatactatgttatttttctctactcagggtattctggcaatgaaaccacatttcctgaaaataaatgtatctgaactt

SEQ ID NO: 646 - DNA, 173 bp, Homo sapiens
cctctccagcatctgttgtttcctgactttttaatgatcaccattctaactggtgtgagatggtatctcattgtggttttgatttgcatttctctaatgaccagtgataatgagctttttttttcatatgtttgttggccacataaatgtcttcttttgagaagtgtctgttc

SEQ ID NO: 647 - DNA, 421 bp, Homo sapiens
gtggaccagaactgagtctccatttcttactgccctgtggtagtcttgggtctaaatatataccatgaaatgccctggccttgcatattttttttacttcttgataatagaatcttaaattgttttgatcttgttatcaaggtctgggagacaagtctccacatcttttcatttaatctttattaaacctgtttttcctttttttaacaaaaaatgataaccactttttgaactttaattttactatatgaggcttgactgtctacactggcataatcaatcaattcaatcagaaatccaattaaatttgttctttgcatcatagaaacaattcatctgataatcattgtgaatttttactaaattgatgagctattatgttgtttagatgaagtcagagggtcactacatctttgactgt

SEQ ID NO: 648 - DNA, 420 bp, Homo sapiens
gtggaccagaactgagtctccatttcttactgccctgtggagtcttgggtctaaatatataccatgaaatgccctggccttgcatattttttttacttcttgataatagaatcttaaattgttttgatcttgttatcaaggtctgggagacaagtctccacatcttttcatttaatctttattaaacctgtttttcctttttttaaaaaaaaatgataaccactttttgaactttaattttactatatgaggcttgactgtctacactggcataatcaatcaattcaatcagaaatccaattaaatttgttctttgcatcatagaaacaattcatctgataatcattgtgaatttttactaaattgatgagctattatgttgtttagatgaagtcagagggtcactacatctttgactgt

SEQ ID NO: 649 - DNA, 295 bp, Homo sapiens
tagtggcttctttttgtcctgagcatttaaatagcatgtggatacagatctggatatattttttcttctttaaaaaaaagtcagaattcttaccagataagaattctgtaccctgtgatttacaccaattttaattacagtccatctgcaatagaaaccactttccctccaaatttagtggtctgttatgatactatttgctattgaagagataccagtttttaaatgaccaggacagtgcaagacaagcattgaattgtgaaataactttagctaaatgctgaagggtttgcag

SEQ ID NO: 650 - DNA, 294 bp, Homo sapiens
tagtggcttctttttgtcctgagcatttaaatagcatgtggatacagatctggatatattttttcttctttaaaaaaaagtcagaattcttaccagataagaattctgtaccctgtgatttacaccaattttaattacatccatctgcaatagaaaccactttccctccaaatttagtggtctgttatgatactatttgctattgaagagataccagtttttaaatgaccaggacagtgcaagacaagcattgaattgtgaaataactttagctaaatgctgaagggtttgcag

SEQ ID NO: 651 - DNA, 697 bp, Homo sapiens
caaagactcaccaataggtaattaaaacaacagggagactataatgtgcacagaagtttgctgtggctgccagctccagctcttctctcccccatcccagctcttactcagatcaccatcacacaccatgtcctttgattactggagcaggtaacagccttcctgctgaattgagtttgatacatttccagcagggaaaagtactacagtccagtggctgaacaaggagaaatctacaaaagttgttttgtttaaaacgggtccaggcatcctgaggacgctttcattggataaagttggtgtctgatatataacttattcttggacaggaaagagtagaaattaggagaagatactgcttctttgccagccaactttcagactatcaagggaaaactagtcagtatttatatggataaaacttattgactaaggtgcttataaacatgacccaagtaagggtttgatattaactatttcctccacgaagtactgtttcatgcctcccactcagtcatcctagtgaaagccacccagaaggctcattgggaccatgatgtcaaagtctgttcttgtgctcatttgccagacattgttgagtgtcagtagatgagtgcgccatgtgggttaggcagcacatggttgaacacttaacctagtgccttctgcatcagaggaactcagttaatagtagctt

SEQ ID NO: 652 - DNA, 309 bp, Homo sapiens
tttgaatagataaatcatatgaactagcccacccctttcctgagtagacttccggggatttggtggcttagtttgaaaaaatctttttgtaaaagtattttctttgctactttgatatttccagcccaaactaatgggacttactctttgataagatgctaattgtataggattaaaaactgcctatgaaatattcaatacctgcagaatgtacttagtaaatatgtctttattgactgggtaattgagattatatacctagccaatttagttaatataggatcaaaaattctgtccatatctctgagc

SEQ ID NO: 653 - DNA, 32134 bp, Homo sapiens
agaaaaggacaagttactcgctgctgtgaaggaagatgctgctgctacaaaggatcggtgtaagcagttaacccaggtgaagacattcttatgtacgagggatatacttcccaaatcagaagcaacaaaagattttagaaattgtccataatcagtagtttaattatttgtaatttatgtccaacaaaagtaactttcctttagagttttgggagggtagatagagctgtctctctcttttgtgatattatagcctatagttgaattatttaaaataagagtacttacagatatcctagcttcagaataacaaaagcactctgtacagaagcatgggaatttgttttaattggatctgacctagatctgttctcaatagaaacacagaatttggtgtgatcttgtttaagtctgattaatggaataagtgtgaaactcttaacataggtaatttatttatggagcttcttgtgataagtataattttttgtcaagttcttcacatctcagaaattttactttgagaggttaatagtaaaaaataccagaaaagccaatctttaaaacatcatgaaactgagagaacagaattgaaactatagaaaatatggtttaattattcctgaagtgcttgtttctctttctagggattaaatgcagtagaatacatgatgtttatttatgagtcattcacctagccacttgatgacattgtaagagtgaatggctttgtttgaatataaatcctttatgtgaatttgaagtaaataaaaaaagtcaatggaaaaagttggcaagattaattaaagttgttaataaaattagaaactttaacatagttttttgtgactatatgactatataaaaaattaaaaattaggataactaatttgataattcattgagccgcatacttatgatgtgtatacttctaagtatgttatacaggagtataacaatttgtaaagatgaatgaacaaactcaggcagccataaattatgtaatatctcaaattttgtcatacaattgctttagagcaggaacatgattagtcctaatgatacctgcagctaactttaaaattgcttggctttcatgtactttgataattaatatttgttctaggagttcatagtaccggcaaaacaaaatgaaatccctcatttaagatttgacttagtggccgggcgcagtggctcatgcctgtaatcccagcactttgggaggctgaggcgggtgaatcatgaggtcaggagatcgagaccatcttggctaacagggtgaaaccccgtctctaataaaaatacaaaaaaaattagccgggcatggtggtgggtgcctgtagtctcaactactcgggaggctgaggcaggagaatggtgtgaatctgggaggcggagcttgtagtgagccgagatcacgccactgctctccagcctgggcgatggagtgagactccgtctcaaaaaaaaaaaaaaaaaaaaaaagatttgacttaggaagatgataaaactttgctttctgaatttgctttcccttgtttcaaactttgactctgctatagacatcttatccctatttttttcccttaggaaagagaattatttccttctaggccttttttccctgaaagagaacgtgtacctgggaatgatagagaatgaactgttgtgctttaaaatgttctttcgtgtaatcaagttagaatgtaggatttattctaggttcatagtctttaactcataataaactagaaagtgcatttgaattaagagtaaacaacagtggcaaagtgtttatgaagggaattggcgtgaagagcagatgagatgcagaagactgtttttaaaatcttttgaccttgctttttttaagcaagtacttaatgttttatcattcatgattattttactgatgttaaataacatcattgtttatcattgttgcaggcttatgatacttattaaataacaagtttttaaatttctgggatattcttttaggaaatgatgacagagaaagaaagaagcaatgtggttataacaaggatgaaagatcgaattggaacattagaaaaggaacataatgtatttcaaaacaaaatacatgtcagttatcaagagactcaacagatgcagatgaaggtatattttcattctttggaaacaagatgaaatggttgcattcactttattagcaaacttttaagtggctagtatgtacaaggccctttcttgggccatcaacatacagtggctagtgaagttcactctgcgtcctaagtaaaacaacttttctaggtggggatgaggtagggaggccggatgcagataaatatgatgatagagataagtattggcgactttagagcaatggtgatgggaggtaaggaagaaaaggatttgatagggaagactttttagaagtgatatgcagactgtgttaaatcttttaaatcaattaggcattatcaagtaagagagtaaagaaatgggcactgaggataagagttacttggtgtgatttcttagtccatctctggaggtgatagttcagtgggtatattttgggacccaggactgagctttttaatgagtgcactccaggtgttaccagtacagattgtctagagtaactgctctatgagaaatacagtaagagttgtggtatttggtaatgagggctggaatgaagaagggatattgagaagtagatagaggccccatcttaaagggccttgtatacctgaagactggggagccagtgaaggagtttaagcaacgcagcagtcgctggaattatactactattttaaattttcaccttggtagcagtggggaaagtggagcaagggatagttggaacactttgctagaattcaagtcaaagaacaagggcctgaaattagatgttgacaatgagagaatgagtttgagtatacaaagagttagttagatagggcttggtgttagtgtgaaggggagaggtgatagtgaagaatgacttccaaggttttggcctgagtgattttgtctgttgttgcttcctaccctttcacctgtcttctgtcagaaggctcagtttttacagtctgtcttttgtatatattttccattttcatgattctagttaggactagaccagtgaattttttttttcttatttttgaaaagattgaaatatctttattactgctaaagaggttattgaagaatatggcttgagtctgcttgcttggtggtcatgtaataccttccttaatttaactttcttgaccagtgactttttgaaattgttacttccatctgctggctgatccttcaatttggaaggtctgtcattacctcagatttaatatatgtctaaaactcacctattgataaggttgatatatatatatatatatatatatatatgtattttttttcaggccaatcatgagcaatgatgtttttaatattttgaggcattattatctttatgcttgaatcctgtgacttttctctgcctggcttaggctacaatttgttctgaaatcttaaagacactttatttctatggctaggtgccgtggctcatgtctgtaatcccagccgaggtgggaggatcacttgaacccaggaatttgagaacagcctgggcaacatagtgggaccccattctataaaaaaattaaaaagtttgccaggcatggtggcatgcccatggtcccaattactcaggaggctgaggtgggaggcttgagcctggaaggatgaggttgcagtgagccatgatcacactattgcactgcagcctgggtgacagggtgagaccctgtctcaaaaaacaaaaaactccaaacctctttatttctagttactcttgcattcaattcttagacatgtctttagtttattattacatactgggataattatggctgatattaataggtttgtcattttcattccgtcttgtatttggtaccagatttttttttggtaaaatattgctttgataatatcgctagtctgctaaaaattttaaaatattctttgctgctttcagagtcccagtgttttcctctgaaatgccactaatagcaaaaaagaagtgaatgatgctgttttcatgttcttaccctatccactgcttttagcatttgtttaactcattccttcatcttctcatcccccagcaatttgagttagtgaagaactgattttcctagcctcaagtgatcttttcttcttaattcctaattcctgttaatttgaaaattaggcagatacttgtagcagcatcttttgttgaaggtgaaaggtatttaagtgattcatcctgttttacttgattacttacagaggtcaggatatagattccatatgataacttctgtgaaaaatagaaatgtataccttaatttcccttaataagcaacagtttcttttgaaagaattattaataagattatttcatacaaaaacatgttcttatgagaatataagagtcagtgtgcctttatctttagattctttaatccaaaatttaaaaattagaagaagaaagttagagtggtggtcgccaggggctgcagggagaggaatgggagttattcgttaaaaggtgtagaaggtgttttacacaatgaagagagttatggagagatgaatggtggtcatgattacacagcattatggatatatttaataccagtgaactgtatacttgaaaatggttagaatggtacgttttatgttatatgtattttataatgtaaaaacttggaaaaaaaattaagaggtcagaatattttagcaagcaggtttttgtgttatctatatgattatggcccaatttgtaacttaatataaagtgtaccaaacatattttcagtttttaaactttggcttactaaagactttaagaatattgctaatgtataattgacataagatcaggacaagcttaattttgtatgaatctattcggtaggaaagaaatcctaaatcatatttagttctgaaacatcatctctaagcatgtttatcttgtatttcaaatatgatagcagctagcatctacttgtattcttgaatgtggtgacagtttgtatttgatttgcattcatcactaacaaaatataattcttttaaatttgtttatatttatttgagaagaatgattcaaacttcattctattgatgttttttatattctcattttaataaagtttattttaaaagttagctttgacagtctttgttttctaagttttatgtgtgtaaaataattttagtttcagcaagttcgtgagcagatggaggcagagatagctcacttgaagcaggaaaatggtatactgagagatgcagtcagcaacactacaaatcaactggaaagcaagtatgtttccaaataccttattttttaattgaatggcagagtattttcttgaatcatcaaaatattaatagcgtttgatagtaattggttagacttttgtgtttttacatttgtttctaaaatgagttacttttaaaaacaattctcttttgctttgtgaagaacttcttcagttatacatatgtaaactatgttatattaatgtcatactattatatacttatacaaatacattaatatatatcatatattacatatttatataaacatgtatgtgtatattgtatataaactatgtaataaatactagtaccaccaatggaatggtctacaagcttatgagtttataagttttaaaccatctgtcccctttcacagtagctcccaaacttcagtgttctgaagaacacctggcattctaattaaaaggtgtattcttgagtcctccccttaaaagattatgattcactgactctgaggtagagcccaggagtctacatattaagacactttcgggccgggtgtggtggttcatgcctgtaatcctggcactttgggaggccgaggcaggcggatcacctgaggtcaggagttcgagaccagcctggccaacgtggtgaaacccctgtctctactaaaaatacaaaaattagctgggcttggtggcacacacctgtaatctcagctactcgggagacaggagaatcgcttgaacctgggaggtagaggttgcagtgagcccagattgtgccactgtactccagcctgggtgacagagtcacactccgtctcaaaaaaaaaagacactttccttgtgatagtgattggctctgaggccatactttgagaaatagtaccttagagagactagtaataccggtacacagtaccctgactggctgatttttaatacgttttcagaagaccagtttgaaggtgacactatttatggtcatccatttttcttgatattttacagtgattttagaatttgaataactcattagaattatataggaattatacaactaaactttattgttagtagtcacttgtgttctgtttcagttgggctgtaaatggaactactagctcagctcagcaaaactaacaaagtatgttttgtttatttcttatatatatttgtaataacggaaggctcctaatccagttactgttttcaggcagtctgcagaactaaataaactacgccaggattatgctaggttggtgaatgagctgactgagaaaacaggaaagctacagcaagaggaagtccaaaagaagaatgctgagcaagcagctactcagttgaaggtgatatattctcacctttatttgtcatttcatgaataatataggcgtattagttcgttttcatactggtatgaagaactgcccgagactgggtaaatttttaaggaaagaggtttaattgactcacggttcaacatggctggggaggcctcaggaaacttacaatcatggcagaaggtgaagaagcagcaaagcatcttcttcacgaagcagcaggaaggagaaatgccgagcgagggggaagactcccttataaaaccattagatcttgtgagatctcactattacaagaacagcatgggggaaaccatgcctatgattcagttacctccacgtggtctctcccttgacacgtggagattatggggattacaattcgagatgaggtttgggtggggacacaatgcctaaccatatcagtaggtatttaatttgatgacttaaatgtgtatataggtttgaaaaatatagtttgaagcttaatgggacctgtagtctaaatgctatgccctgatgaaagaaaaagaagcatgtgccctattgaaagaattgaatataggcttgaatttgaagttaaagaccgtttgaagatatggtaaatgatgttagctgattgacagatataaattgtagaattttatcatatatatgggggttagggtctacagtatagggcagaaatcatgtagttaaaaattacccttaataccactttatcacccatagcttggatttttcagtaggtccagcagaacctagttttctttcagcactggaataggtagtttttcctttgcttcagcacaagactaagtagtgttccagtggcttgcactcgacccatgatgtacaaaaagtcacatactgtatctttagacgccagagtgtcacttggtccagtgagatgcttatactatgaagagatgcatggctttgctcaggctgactgagggaggagcagattcatttatctcattttatatgcattctgaagcatatgtacattgaatagaatgatgagtataattctctattcctgcttttattgaagaggaaatttgttgaaagtatagttcaatttgtgtaagttaaatgctacctcattataatagattcctacctaggtcattgatagaattgtactttgataccagttccagagtaggagttaaaaaggcttcaagagtaattgagtatggaaaatagtgtttttcttaagtcttgttgggagattgatataagtatcctttcttttatttaatattgatcttgctggtgggtttactactggcatagatacggaagtctgttctctgtggatatggataaataaatgacattaaagattatagtcatgattggagtgttgtgttataaaaatacctcaaaataagaatttttagctacttagatttagcaataaagacaccatcctgtcttcggaagcttatcagctaaaggaaggttagtgggaaacaggttattgctaagtggatcagatgtatatagtagtagctatcttgatagaaactcagcacaaatattgagtctgaaataatctccaaactgtaaaccctgtaatgttggaggataggatggctatggctgataaataaatggcttttagactgtgtgtatctgcttgtcttattgaaatgtaggagactagttgcaataagcagttttatgatacaacagtaaaggtagaggatgctttttttccctctttttcaaagtagaaattctgtgtttgtgctaatttatcctttctcccttttaaaataccaaggttcaactacaagaagctgagagaaggtgggaagaagttcagagctacatcaggaagagaacagcggaacatgaggcagcacagcaaggtaaggggaagaagtattcatgtaaactttgtatataattttgggtaaaatttcctctctcttccatctgtgaagaaagtataatttggcattttggttatagctcaataaaaatagcttttatactttcagaatatctttctttctttgacatttgttagggttttaaaataagttacctactagctttgcctgaagcattaaagttgcaggcaaaattatagtacatgataggttaatgggatcctggctgtgtgtgtttcttttctgtagttattctctttggttctttggttaattctttttttttttcccaagaaaatactcacttcttattttgaagagaaaaacagagcattaccatcccaggtagtttacttaaaactgcccatttaatacatgctaacgtttactcatttactcttaatttgatggatccatctgggagataatggagtacgtgttatgtgtattgtttatttctctactactccctttctcccatgaaacgcaagtatagcctgctacaggagcatgcaagaatggaagcaggagagattcaaagaaggttttctagaggagagaatgcctacacgaaagatgagtatgagtaactaggcaaagaaagagacctctgtaaaatgtaatgttttattacagatttacagagtaaatttgtggccaaagaaaatgaagtacagagtctgcatagtaagcttacagataccttggtatcaaaacaacagttggagcaaagactaatgcagttaatggaatcagagcagaaaagggtgaacaaagaagagtctctacaaatgcaggttcaggtattttttcttctttttttttttttaaaaaaatacaggtggtcacttattagatctgtgtgtctagaagagagactaaagtctaccttatcctaattctgaaatgatgatgaataattataactttgtcttttgagcacttgtcacaatatggtgtgtttgaaggtgtgctcacccacagtcttaggctctttgtgttagattaggaatagcacaaacatatctttaacttctgtcttataagctaactcagattgtctaatcattgtttaaaataatgccttttggaatctaagaatgccttaaaaaaaaaaaagaaaaagataaacaaatgtacctataatacattgtgttcatatacatggggttatttattagcatgctttttctctttttggttgctatttatgaaaggatattttggagcagaatgaggctttgaaagctcaaattcagcagttccattcccagatagcagcccaggtaatgatgctttcttattgcttatgattaataacttgcagccatttaaacactcacctgaatgtctgttgagtgccaattactggattaatagctgggagactagtcaatgaatcaacaaatgatgatcctgagtgctaaacacttgctaattatgtacggtgctgagggaaaacactaagaaagaaatccataccaactaattggatgaggggaaggttagagagcttttattatacaaaaatgtccccaatcctgtcacaaaacaaggagagagaattggccaaatcctatctagaatagtggcttatgtattacagatgttcattaaatatcagctagctctggaaaatcctaatatatcagcagggggaacagtatggtaaccatagatcacagattatatttgcaaaatgatcaattgaaaatttgtacctcagtttagtgactcagccttccaaagttttcaagtgatagtgtaagacctgttattctttgatgtgacatacatgtctttataaataatataaagaaaatcaaataaaaacaagtattgtgaattttgagcttcagtttttcaacttgaaaattctgagagttatttgtagcaaaaagtattggcttagaagtctgacatttctgtataaaaagtggtttttaacattaaaattttgtttttaaggttcggagaagttcagactcccaaagctttgaccatataaatatatttttcccagttgctttatctgtagaaattatagtctaaagtaattgaggaagaattaatgcaggaaagggtgctggtgtggatgtgtatgtatatgtgaattaccaactcagattgaattgtgatctttagttatcagctgagaagtagctctaaaaaatttatcaggagttaaatacatagagaatgctgtaagaatcttttaaatagtaaacatgaacatgggtattactaaactatattagtcatggaatggataattttattattaaaagttgttactaaggagaagaaacacaggatgacaaatggcctttctggctgtttttcctactcatttgttgcttgtcaattatttagtttccaggcctgtcaacttgttttattctaaatgtcttgtgatatgtaattcgtgactactggctgttggtgatcaaacttgctttcagaatgatagttactctttattgaacacttaccatgggccagatactttcataacaatttatatacattaacttctcttaaaatttaaagctgttatgattattgtatagctataaagctttctcttaaatacttttatgttgacactatttttctttcttagacctccgcttcagttctagcagaagaattacataaagtgtaagcctaccttttcacactcttataattgtgtagtcaccactaactgatacttgttagatgcgacacttatgattaactttatacctctgacgacctgttcagaaaatactctgaactagatttggagcaacttttgctttttttttttttttttcctttttcccattagtgagttgggtccctaaacattatatattctgcttttatttatgtttttattataacaagagttggggagactttcatttgagtgttagcaattatgtggaagaggtaattgtttagaaagtagtggaagtaaattagtttttgtgtcttataagtagttgtagttcttctgtgtccagctctgtggtagtatacccaaaacaaagttatatgctttttttgtgccgtataattttgcatggacactgatcacttgagttcggaagatctgaaatctggttttgacatagctagctttaacaaattaacctcttttatctcgagttttaaaacagggttatgtattttaaggagttatagtaatgtgtgtgacagttgttagtaaactgaaaggggctatagaaatggaaggtatatgagaactactgaagtaaggatgatgctttttaaggctttaaatccttttgatttgtgacttctgaatgtttattgaatgtacaaatgtctttccttctaaaggattgcagaaaaggataagcagataaaacagactgaagattctttagcaagtgaacgtgatcgtttaacaagtaaagaagaggaacttaaggtatagtaatttgtataaatggctgcaatattttacagaactgaaatttaaattactttgatgcacataatcagtaagtgtatatgaaaaatggaaaatagtctagaattcatttgaaataactgtttttctaaactacaaaattctctagctctctacgaggaaaaattcaaagggcttctctcatgtgatataatttacaataatttgataggaatatgctaaataacaggaattggtggtttctcttgattatttgggaaattttgtaagttgagacatttgcttaactcttttgtagaaaagatgctttacaaactttaaaatcagttgtattaagtattttaaatgctatttttccttgttctaggatatacagaatatgaatttcttattaaaagctgaagtgcagaaatttacaggccctggcaaatgagcaggtagatctttattgcttttgagcattgatctcagaatttcaatttgcgtattcttattttcattgatattgtgagccccaatttgattgtgtaagtaaaaaatataatggtttatcatctttggctgcatgatttgatgttactgtttttatgttgaaataaatgtttgatccagtgaattaatcacttcaagatatcacaggaggcagttaaaattatcttactatgctggtttgtttgagtcttttatttgagccatttaattcaaaaaggatatacctttttgttagtgtatatgaagaatggaaaatagtctagaataaaagaagtaaaaaatatcgaacagcaaaacatgttacagaaatatacagtattgctgtaacttcaaatatatggaaatacagctttttaatatgtaaaaattagtgaaaaaaatagttttgagcacttcctgtgaagtgatatcattttcttctcattccacacacaggctgctgctgcacatgaattggagaagatgcaacaaaggtgactaaagtattgtacatctagtcgttcatacatttatgtttaattataattgttgcagaaaatattgctgcttataactgatagttgtgcccataattcttgtagattttctgaatgtatgaagtattttaattttttttttcaccctcatagtgtttatgttaaagatgataaaataagattgctggaagagcaactacaacatgaaatttcaaacaaaatggaagaatttaaggtgtgtgattaagcttgtacactcaggtttcttagaacaaccttgtatacttttcagttgagtgattccagaaatactacgttttgtatgaagtcactctgaaacagtgtttctgtagtttattaggggacttatgcaaaccatgaattttatcatagactttccccctagattatctgttcttttagtggagcttggagatttatttttggcccccaatcttttctcagctgatagtttctatttgggactgtcttatttgtctccactgttgctgtagttctagtttctggtcatggccaaccaagtgctagggtgcatctctgtgtccagtgaaatttgaattatgtcagtgtataattcacctgtcactttgaggactgaaagctgagataaaggtttgattgttcaaaaacccattcaaatgattgctttattaccttttttcttaataaaacagtaaattgagactctttcttccagattctaaatgaccaaaacaaagcattaaaatcagaagttcagaagctacagactcttgtttctgaacaggtaaggcttttcctaaattacaaagtagaaatacttgttatataacaagatctggttcttcttatttaggtaccaaattactaattgagaaattttgcttaagcttagatatggctgttattgcctttctattcatcctgtatctaaattcaggaaattttttctccctgaggtgaagctaatgccaatctgctcaaaagcacattccagaaaaataaaaatgtgtaataggatgcataaaaataatttaagccattttgatacatttgactttcagaataaatgtcctgccttagacttggagcctcagctttttcttttagggagcatggtgtctttaaaggttgaaacttattactagcacttaaaagcagtgtgatgttgatcaaatagcttaacctttgtgacacctctcattccaagcctttcacatggagattatattatatttacaccataaagttgttagatttgaaaggagaagcttatgtatggtgcctagtctagtgctttgtttatgacaggtatctaaaccttaattcttttcccttagagtatttattttatccatctcatctccatcccctgccaccatcactattcattttatatttatagcaagacatcaaaactatatcagctttgaataagcatggttccataaattagagcccagtggtatctgttctctgcctattcctcagtgctgccttcgtactcttcttctacgcagctcttacaattacaatttattaataaaacacaaactcttgatgacacattagaataggaagtttgcgtttgttcctaatattaagtttttgaattgtacttttattggaagccgaaatgtaaagccattgcaaatgatagcacttctttagcaaatgcatgcgttctttcatttattttaaaattcacatttatgcagatattgagctggtgtaagtagctgtgcctctggaagtattttgttaacttgtcaagaaataatccatttattctacctccccgtatgatattaagtgcattattacatagtcttactacttactttgtatttgctttacccttgtaaactaaaggtaatagaggagacagtgctgaagggatgatatttagtttaaatggcatttaaggcttattcttttttttttttttcttcttgagacagagtcttcctctgttgcccaggctggagttcagtagcactatcttggctcactgtatcctccacctcccaggttaaagccattctcgtgcctcagtctcctgagtagctgggactacaggcatatgccaccatgctccgctgatttttgtatttttagcagagacggggttttgcaatattagccaggctggtcttgaactcctggccttaagtgatctgcctgcctcggcctcccaaagtgctgggattacagatgtgagccactgtgcccagctaaggcttatttttgtcttatttccttttctggtatagcttacaaaaaagatatgataccaattataagatttctctccccccaccctcccttaccatctctgaaataagaatgtatcttgtagtctctggttacagtttagttgtttagttggcaacatttttaatttttactgttaaatagcagtggtgagatataacattggtgacttggattagataaaatgtaatagatttttgtgtgtgtgttcttacttggaaaagcagagtatagtttctgtgtgttagttaccagagatttttgaaatgctgataaccagtgtatgaagttttaaactttaaaattaacttcatggaggtaaaacaaatgcttagaaacttctgaaactgtcctagaattcttatattctagtagtatccaggtgctggcgactcttatttaaacagaaaacttctgttctttgctaaaaatggtattttccatcattagataaaagtaaaaccaccagccttaaatttttcttttcctttaaaatcatgtaataccttgagaaatgccattgtaataccttatgtaaaattcccaatcatatttatgaaagttaatattattgctatcttattaagtcagccttttattataatgtttctacgtacttttagatgttttgttaaagtgacaacttttagtatgagatgtgcttttgttatgaagaataattcacaggataaaattttatagccacattttttgatttatttaaaagaattatttgataagggggaaactcattttgtgatactaatttaagatctgttgggtaattcttagaattgttcttctgactctgaaagctttttattaatagtctagaaagcatatgactgaggttttggttatagttgagacttctttcatcttggcagacaaagaatcatttctgtggcttttcctctagtcgtttttattgttgctgctagtgaaagaagagaaaagattggtataatcttaatttctgtcatttccacttttctttaacccctttctatcccacagtcagaattccaagtgacagttgagagattgaacagtttagttatgtaaaaatttcagtccttttaccccatggatttttattctggaggaaaagattgagcgtataaaagcagaaaccaataatggtgccaagttgttgtttcttcaggtgtaggaagcagaaagacaacaggtaccaagtaagttaacctgttgataccctaaaggagggaaggctgcatttggatttaggcttgcagatggtcagataatgcaaataaatcatttactaatatttcatttactcagaataagactttttttttttttttttttgctgtgggggagcacattttgacttttagtgaaggagcagcatgacattcttattccagtagatttttaagattcagtgatcaagattattaagtgaaaactataagaagtttcttctttttgccctactgccttgttaaattgtattgcagaatatattgtatatggtttagttttggaaatcatctaggggaggaaacagtaggattggattaaaccaataaagtatgaagtaaagtaaaaatgttggaggagatgcaaactaagctgagtcaggtttatgcaatagagtatttgatgagctgcagaccaagaatactttctaaactggaacttcattaaaaaaaattcatcaaatacttatttactagttgagtatatgctagttgcttacctacatgctgaggttgcagagatgaatgagacttgattcttgccctcctaatatggagatagatatgttaaacagaaagttatggtgaatgaagtttctgaactctatacaggtttagaggaagagataatgcattctattaatatttgaaggaggtggggaggtaacacagggaacaactaaacctcgttttgaaaaatgagcatgaatttgccaaagagctaagagacagttcaggctgagggaatacaatgttcaaagacatgacagtgtggcaagattggcatattcagagtattggtatattgcagaagtacaaaatacaggaaggatgtaaggagtagagaaagatttgctaagacctaattatgaagggctttgtatgctgtgtcaggaccatgaacctgatgcagcatgtgggtaagccactaaagagtgttgcaaggataaatgagcatttagcctaacattttagaaagaatactctggtaggtaggagtaactaaaggtacaatacagtaaatggttaaggtgcaggtaacttagacttaatagtgttatgtctttttgtgagatggcattcattgaaaatatagatggacaaaagccatcttcatgaatgatttaaaggcttaatgcatgatttgtttttcatagtataaacctgatttaatgtacttttgacaactcctatttcccttctcatgtttggattattttttcccattgggaagttttttcctgtgcctcctacaaaacaattcttatgaactagaagcagagagaagaattagggtattatgatatttgagatgagtaagctgagggccaaaacttaggcattaaagagaagggtttaatttcataaatatgtacagagtggaattttaggacttggatagggcagtggaaaaattaatatcatttgtaaaaaatgattgtaataagattgggaaaaacaaaaaaatgggaaaaaagtaagaaactagcaagattgggaaagaggtgcacagaagagaatgttctaggagaaagaccctaaatctttttggtcaggctgcttggctgtctgaagataagggaagataagggaatactgagggagaaatcccactttggacataagataaattttaacattggggacttgtgtgtgtaccagaggatgccaggagaagtttcaaaggggactcatcttacatgtcatgttctaatgctttataaatagaatgtattcctgttgcttttgcaatttacaatcagttttaaaacattttatatcttgatctggttggtagttacataatatctatctaccaaaattcactgagctgtgaacaggatttatgcacttgtctacgtaaatgttacaccttagtatagaaaaaaaatcaattaaaagagcccatgtttgtctgtctttctttctttcttcctttttttcctttctttccttcctttcctttccttttccttttccttttccttttcctttcctttcctttcctttcctttcctttcctttcctttcctttcctttcctttcctttcctttcctttcctttcctttccttctctctttctctctctttttctttctctttccttctcttttcttcttttctttctttttttttggacttgcgaggtcttagagtctggattctttgtatttgaagaattgaattaatgtaaaggaagtgaggcagattgtcttaaggttatcttttctagtgattaagatttttttcataagatactaattcattttgccagcccattttacactgctactttttctgtgtctcttgtgtagatgtatctctttgttttgtgttttctgaattttttaattatcaagtcttcagataagttattgtcctaaattttgtatctatttaataaccctaaacaattttcacaaaattacatttctcatctggttttacttcatgcaaatttggtaaagttaaactttttttggtgatttttattttagcctaataaggatgttgtggaacaaatggaaaaatggtaagagtttagttttctttttatattttgatgagttacttctaccaaattaactacattaattagagttttaaaattctctttaaactttgtaatggaagaaatgtagtatgctgttgatttgggattacattaccgtttgtgggtttcacgtgtggcagtaattttacttgttgaggctagcatataagaatgaattacttgagtacattttacttgtaaagaggaagtatcctcagaccatgatcaaagatccctagaagcctttctagaattaaaagtttataagaaatgatggacaaaagagttgatccatttaaaatgattagaaataatatcattaactgctgggcgtggtggctcacacctgtaatcccagcactttgggaggctgaggcgggtggatcacctgaggtcaggggtttgaaaccagcctggccaacatggcaaaccctgtctgtaccaaatgtacaaaattagccaggcatggtggtgcatgcctgtaatcccagctacttgggaggctgaggcaggagaatcacttgaacctgggaggcagaggttgcagtgagccgaaatcatgccattgcactccagcctgggcgacaagagtgaaactctgcctcaaaaaaaaaaaaaaaaaaaaaaaaaaagagccaggcatggtggctgatgctggtaatccccagcactttgggaggccaaggcgggtggatcatgaggtcaggagatcgagaccatcctggctaacatggtgaaaccccatctctactaaaaatacaaaaaattagccaggcgtggtggcgggcgcctgtagtcccagctactcgggagggtgaggcaggagaatggcatgaacccgggaggcggagcttgcagtgagctgagattgcaccactgcactccagcctgggcgacagagcgagtttctgtctcaaaaaaaaataataattataataataatatcattaactttgaaaaatagttaatacatgtgttacaaatttataatttcagcattcaagaaaaagatgagaagttaaagactgtggaagaattacttgaaactggacttattcaggtggcaactaaagaagaggagctgaatgtaaagcattttgtagttttgttttccttgtgattattcagtgacataaaaggatttctctgtaatttgtgtaaggtttttcccatagatcttaaacttaatagtacctctcacatttataaatttatataatgcttttttaattaaagtttttttagaagttaaaaatgcataacattgactgccttaatgaggtagatactattgttatagtttgtcagtttccccacttgcaccaaaattataaccaaatgataactagcagacttaattcatgaaatagtactggaggccagagaagagattgccattctattttatggttgtcattagctttacctaacttgattgggaaaaggttgcgggaagaagtaagttaaaagatgtatttgaatgtagggagaggagtagcttaactaacaagttgtatactgtatatttttgaggttgtccagacatgagtggaaatatatgtggatgtaattgaattaaaaatttgtttggatagctatagaagttacagaattatagacattacagaattatagacatggaaaaaagtgagagttttgggccttccagagtagaaaagaagcagctaaagaaatgagaaactaatgtattttgaagctagctatatttttcagagagtaaaatcatgttttgcttatgtgtctttgaaaaaggcaataagaacagaaaattcatctctgacaaaagaagttcaagacttaaaagctaagcaaaatgatcaggtaatgtaaatttttacaactgttctttgtctctgtgttttttgtttgtttgtttgttgtttttaaattaaaagaaacggggtcttgctcttttgcccaggctggagtgcagtggtacaatcataactcaccgtaacctcgaactcctgggctcaaccgataactcctccctcagtcttctaagtagctaagactgtaggctcatgccacaatgctcggcttttattttatttttttgtagagatagggtctcgacatgttgtccagactggtcacaaactcctggcctcaagtggtgctcccaccttagcttcctaaagtgttggaattataggcatgaggcactgtgcccagcccattctcttttaaacagtgggcaaactgttgcataaaaacaagtctgttgtttctcttcctccaggttggaatatgtcaattatagttttaatttatgaatgataatcagtaatagaggctgcaatttaatactgattgccaggtactgtgacaaatactccagatagggtgccattgcctcttactagagtgataaaaaggttctaagtatacaaatataaagtaagactctagtaaaagaggccgcctgaaattaggcagtttcttagttgtgttttctctatggttggaattattgattaaataattttaacatttatctaatgattttttcttttggcatatttataagtgaccttaaagctacctatgttcaaaatgctatttgttgtcattattatgacattaaaaaagtctcgaaagaatgcctgggcttttcccatttggattttgattgtattggaaaatctaaggataatgtgcatttctatttctgacccatttctattttgaacaaattactaagtaggatactttcctatttccaggtttcttttgcctctctagttgaagaacttaagaaagtgtaagtgataacattattataaactggtttttcttctttggtccattttttttttgtgtgtgcttagaaatctagttttattgtgcagttgggacagctgatgtatgtttaactttcactctataatttttcttaatggaataagagaacttagctgtgctttcccaaattcagtataattaaaaaaaaaaaaacaaaaaaaaactatttccagaggatgggagtcagtatagttgaatggaacttgattctcctctgtattcctcagggtacaaatcttatatttctgatgtacttctgaagcacttaactgacttcttgtgtgcataggcttcagctgtctgttaggaggagctttatgttcaccctggccattctacaaagacatgttgctattttatttaaaatgggaaagggttgatttggagagccatttcattatttggtgctatttttatatcttggtgggtcttggtgatttctaatcaaattatactgcatttctttattgaaggatccatgagaaagatggaaagatcaagtctgtagaagagcttctggaggcagaacttctcaaagttgctaacaaggagaaaactgttcaggtattgggagacagagaactgtgttttatgtttttgtttatcaactttagttaatatcatttaatttcgtgtgtttttgtctgtgcattgcattttatgtcaatttctgtgtttccattgtccaatcttgtctgttttgtcattgtcaaggatttgaaacaggaaataaaggctctaaaagaagaaataggaaatgtccagcttgaaaaggctcaacaggtaaaaatcccagagccatagcatgacagatttattagttgtgttatttatgagctatttgattttttttcttgttactcagaaaaaacttagtatgctgtaggtatattgggttatgtgcttttaattttattttttgcctgatttgagaaagtattcttgatattttaatctgtatatcttaaaaattttaactgttaatggttattttctagaacattttttgtgttaatgtttcattttagtttgccaattacaaatgaaacacgaaacagtttggcaatttttttaatccccctgcccccttctaaaagaaaactgcatggaccaaaatgttatttgaatatacattgctctatctctgccttagaacaaagtacaagtttcattgggatttcagacatagatgtgattactggaaattgatgagttttgctgattttaatctgataaggctttcttgaaaaaatagtgagatttcattgaagagatgattcattcatctcatagattcattcagcaatatttattgtcaaagcagtacttgtcaaagcactgtactcgtgattggtggatcactagctagtgattggagataatgtgttgaatgaaacaggtaggatgaaaagatcatacttttctaatatagattgagagttcaggaaagtcttctcctgaggaactgacatctaagccaagaatctgaagggcctgtgagaagagagtggaggataaaaggtattatcagactgtgtatgattaagaaaaaattaaaaaaggacatcatagagtactgttgagtagttggccttgaaaactgggatggagaagagctctgatacagtagggaggtgtgtggagagttaatattctaattttcagtactgtagaagtatgactggtctgagtgcagtggtgtttacaactgattgatcacaaccagttacagatttctttattccttctccatcccactgcttcacttgactagcctaaagaaaaaaagcatcacattagttagacttattattcataactattttccttgtccctcccccttattatttttagtttattaattttcctgttattggagtcaagaggaggtaaactcaaaacacatctcattttgtcatgaaaaattcagctagtttctttgtaatttgaagtgtacacattataaagacttataaagcttaataagttaaattgaaaggattattaattgatttttctgtcctttgtatttcagttatctatcacttccaaagttcaggagcttcagaacttgtaagtaccatttatctcatttccttttactatttctttttcatgagttaaatagaagtataatgaaaattatagcttcttgatttcaagtggtgttttagaaaatacgaaaatactgattatctcaaaactcctaagggccctaagtttcttatttggctttaacctattaagtttttttgtgggaaggaggtaggaagtcttttcatgatttataatctgaatataacctcaaattgagatgttgctctttgcctattttaatagccatgtgaaattggtatcttccacatccagatcaattgtagtaagttttccaaatttgtttgtattgacttaaacaaggtgatacagggtagaggtacagctaaactaacttactcatgtctggatattcagtgatagaatggttttccttaatcatcctatgcttcctgatttgattgtctccaaaatcttaaatgcctttttttttttttttttttttttgagatggaatctcgctctgtcgcccaggctggagtgcagtggcatgatctcggctcactgcaacctccacctcccgggttcaagtgattgtcttgcctcagcctcccgagtagctgggactacaggcgcgtaccaccacgcccggctaatttttttgtatttttagtagagacggggtttcaccgtgttagccaggatggtcttgatctcctgaccttgtgatccgcccgccttggcctcccaaagtgttgggattacaggcgtgagccactgcgcctggccttgtatgcctttatacttgataagttttagtttagttcaatcagctggtctgtgagtactacccaaaatatacttttttcagtgtctaagatttttgctttttatggtcatgtaacattttcatttagagttctgattaatttattatcagattaaaaggaaaagaggaacagatgaataccatgaaggctgttttggaagagaaagagaaagacctagccaatacagggaagtggttacaggtgagaaattaaaaacaataaaaaatagcctttttatacttgactatcaatttaatttacacctattctttttaaggatcttcaagaagaaaatgaatctttaaaagcacatgttcaggaagtagcacaacataacttgaaagaggtatagtataaacaaattaccaacatgttacataaggaatgataaatctttgtttaaggcattagaaagtaaagatgttaatatgttctgagtttctttgccagaaaaattatgttgtaccatagttttgttgttgtttaaataagttagcttttatttctggcaagtcatacttaactgcttaatctgtcaacctgagcctacaagcatttccttatctctaccttttcaaatagactcttagttcatccttaactatctgtttaaagtattagtctttaatcttttaataagtatgaaaaattgtttaataaaactcattctgtccttgctttataaatgacccaatcttaaatttactgcatataattatgtttttgtttttattggtgggtgattccatatatatgttttagcacctacaacataacatttaatgctaacagcattaaaaatatgattctgtttctcaggcctcttctgcatcacagtttgaagaacttgagattgtgtaagtatgctttaagaccacattttgaagagaaacaaacgtctcattattttccagggtgtgcttgaatataatgatgagtttcctgtacatcattaactttattgttaagtggaaattataattccagacgcaaataggctaagtctctgttgggtaaaataaaggttatttaaatgctttcagatacctggagactttatcctttccaaatccatcaaacccattttttcaattattctttctgcaaatataggctggttttaagttattttttaaaacaaaatatgcaattattatagagattaaacttatttcaaatgaaaattagtatttgaattagatgttagtaacatctctgaattaaccaaaagataatcttagccataatcttgataatgaattttaaacctttctgtaattttaatttatttatagggaaaatggaacttgtcatattatcctgtgctgaataggaaaactgaatctagtcagcataagaggtgtcagtttctgtagatattaatcttagaaaatgttttattctagagagtctgttgtcttaaggtacagcaggttacaatggtgggaaagggtatctggacctgatctttttggccccctttaaaattgcttttaacaaatttttcttggtgataccattactctttattgatatttgttttaaagaagtgccccgttttaaactgtcaagatattgaggatatttattaggttattatctttctaaaagggagattactctgttcttggaagattactcatttgtacaattattgtttgtcttttggctatggtgtaactgtcgaggtgcttatctcttatttgcttggaaagcttagggcctcatttctggcctgtttatagtagagatatgtagaccattaaagtaggtaattttaggtatatttctgccttacattttttttttttttgccattttcttttttaaattaatagattttattttttgtggtggagaactttttatatttataggaaaaagagaaataccaattctccctattaacatcttgcattagcatggtacatttgttacaagtgatgagccaatagcagtacattgttatcgttgttattaactgaagttcatagtttccattaggaaactatgtgggttttaacatgtataatgacatgtatctatcattacagtatcatacaaaacagttttactgccttaaaaatctcctgtgttctacctgtgtatccctccctcccttcctccacatcccggcagcaccccccggcaaccaatgatcttactgtcttcagagttttaccttttccagaatatcgtagttgaaatcatacagtatatggcttttctggtttggctcttttcttttctttttttttgggacagagtctttctctgtggcccaggctggagtacatggagtgcagggctgtgatcatggctcactgcagccaggacatcctgggctcaagcgatcctcccacctcagcctttcgagtagctgggactacaggcacatgccaccatgcctggctaattttttagaaacagagtctccctgtgttgcccaggctggtcttgatctcctgggcttgagtgatcctcccaccttggcctcccaaaatgctgggattacaggcatgagccaccatgctcacccttggattgccttcttttacttagcaatatgcatttgagtttttccctttttatacatttatctcactcttcatgtatgctgttttgtcatttttttcatatagatttataagcatcttgaaattctggatcaaggtgtggtaaaaataagtgttcagctcaacgaatacttgagactctattatgtgctttctggcattggggataccgaaatggataagatttcctatcctgaggaaacagttaaacacatcattttgatggtggtgttatgctagcggtctattgcttaggatgaccagggcaattgagattcacttgggctagatagagtaagatttacgtcagcattgggtaagggaaaaacagattaaattatccatagcatctcttcagtacaaaggttagacatattttgtaatttccagggtcaacaaattatgactaagattcttgggggcaaaactccttgcttttgaagtggtaatttttgcaacaatttgataaaatatagttttgttcttagtttttgttttagagtttcttcctagataaagccacatttgcttaagaaatgttaagtatgactgagtagaatgatcctagaaatatctttttaaacaaacttctaagttggtataatatgggggaaaaaaagctggtatgtattgtttctgccatcttttttcttaggggtgatattggagtctggttttccttttttatgtactttagttaatgcagatctttgtaaaaaattctaggttgaaagaaaaggaaaatgaattgaagaggttagaagccatgctaaaagagagggagagtgatctttctagcaaaacacagctgttacaggtgaatatggtgacttaaaattaattattttgtaaattattgtctttgcatgctttaaaataatttttaactgctgccaaaaaatagagtacagaatgagtctccctcccacccagatactaggtgtcattattggcatgttttttgagtaagtacccatgcataaaatgtgtgtatgtatgtatacttgtttattaaatactctgttgaactatactaacttgtatattttgctttcttcacaattaacagtgttttcaagatctttccatataaagcacatttctgccttaacttttaatagttttatgatattggatggttatatcatttattttatttttatttttgagacagagtcttgctgtgttgctcaggctggagtacagtggcgtgatctcggctcgctgcaacctcctcctcctgggttcaagccattctccttgccttagcctctagagtagctgggactacaggcatgcaccactatgcccagctaatttttgtattttttagtagagatggggtttcagcatgttggccagactggtctcgaactcctgacctcaggtgatcctcccacctcggcctcccaaagtgctgagattataggtgtgagccaccgcagccagcatatatcatttatataaccaattccagttgatggatacctagattatttagggctgttttttctgcacaaacagtgcagcagtgaatatccttgcacatgttttgaatacttttactagtgttatctgtatcctagaagtgaaattctggatcaaggcttatgtagcttttttgtttgttaaaagagatagttaaatagaaaatcaatatcttaccttcatgcagttagtattcaacttacttacagaagattgatttgaagtcatagcaaatgtgtagatgcctacattgtcttggattaatcttgctcacattacatgcttcaaggtttgagtctaccacattccttctccctctcatgtaggttcattttaaattttgttagacaatgctagatagacctgcaaaagtgttttcactaattgacactctcaccaactaagggccatttcaccttcttcctttccaacattgacaaggataaaaatttttgatattatacttgaaagatggtaagattatttttaatttgcatttgactgcgagagaagttaagcatttttcgtatgttcaagccatttttatatgaattgtcctttaatttttcccacactttttccactgagttgacgttttttttttttttactaatttgtaagatcctttttatgtaataagggaaattaaataaccttttgttattatatgaggtgatttattttccccattttttcttctgacttcatttgtgtttttcccctttttgggaaatttgaaacttttatgtactcaaatataagtaatttctagagttttaagtctctggaagaaaggtatctctctacgatcataaaaatgtattcggctgggtgtggtagttcacagtagtaatcccagcactttgggaggctgagacaggtggatctcttgaggtcaggggttcgagaccaaacatggccaacgtggtgaaaccccgactctactaaaaaaatacaaaaattagccgggcatggtggcaggtgcctgtagtcccagatactcgggaagctgagacaggagaatcacttgaacccgggaggcagaggctgcagtgagttaagatcacaccactgcactccagcctgggtaacacagcaagactgccatctttaaaaaaaaaaaattacattttcttctaatgtgtttataattctttttgtttgtttgtttgtttagcttatttagtgtaacttatttcagtaagctgtaacaataacattgtaaccattaaaaagagaaggctagccacattattaaataatccatcataacagtagtaattccgttccccagggggacatttgtcaatatctgaagacatttttggttgtcacagctggggcaggcgggctggggcatctagtggatgggtgccatggatgcttctaaatgtccagcagtgcataggataaaacccccacaacaaagaaaaatatgaaacccaaaatgttactagagttgaggttgatttgaaatgtcacttcatactaaattcttagagctatttcggtatatttctggattctattttgttccattgagacatgcaaactccgcagctagtactaatataaatactctaatttcatcatatgttttaataaagagcttattacaccctttaaaattattgctattttggaatttttctagcttgtatgatctgtttctagcttgtatgatctaagtttatgtggaaaaaatctgtttagatactgatgtttaatttttatttaattaggatgtacaagatgaaaacaaattgtttaagtcccaaattgagcagcttaaacaacaaaactaccaacaggtaggtattattagatgtcttgcctttcacttacgtggcaaaaaaattatataaccagtgacatatgagtatttttgccatttctgcattttcattgagaatgaagtatgttttatttatgtttatcaaattttatataaaagaaagcaacttgctatgtcatatccaaagtaaaacaaatctataaagtatacacaaataatattattgccggtattccagctctgttttgtattcatgtgtgttttctgatcctagaattcttagcaagtcagtttaaatactgtagaggttgggttaaagatatgtgtacacactcttatctcccctcttcccaaatgaaacattagtaactggagagaaactaacaaatgtatcataagcaatagtctactactatttaaaagaggttttcaagttataattctgcttggtaaatcaaaagtgtgtttttataaaagatgctacccaaaatagcctgtaaattaatttatgcatgtatatggatagacttgatagtattttgagaaacaaatgaattggagtccttgcaaacaagaagcttgagagattattgtcaccaaggaataaataccatatatgaagggctgtgtacctttgcatgttgatgtataaataactttgttaaacgtgaggaaacataacttgtcctagttttgcttttgatttctgttttttttttttttttttaacttggaagcttaacagttttatgtagtcaaatttgaattgtgcagtttgaaaatgtaaggtgtgcttccatgcacatagtgggaaattgataaatacttattaaatgaagagttcaagtacgttgcgacagtagagattggatttagcattccatacattttacagatttgtacatgtttttattaaaatcacttgattaaagtcagggttactggcatatgaaatatatactatttttacttttgttgttttcttaatttatatttgagaaaagcttcaatgtttttaagtctcctgaaaagttttgttctgaaataacatttaactcttttgataggcatcttcttttccccctcatgaagaattattaaaagtgtaagtaataagtttgagtcacagtttataaagtcgtaactatttttatgtggtaaaccattctcaaataagcaatttagtgtaactgcaaatggcacctgatttttacagttctatttggatatcttgaattgcagtttagagttgagtagtacctttggctaagatgctttttttatggtatttggatttgaatattttgttgagggagatgtttgtttttgtttttttaggcattcagaaaacatcaaatcaagttaaactatactttgcagggttttctaaatcaccttctattatgtcagttatcttactgggtcttctttcttctagatgtgattgtgtaattgaatgatgcaaattttgtcttagcttcatttttta

SEQ ID NO: 654 - DNA, 1149 bp, Homo sapiens
ttatgaggcacttgagagtgtggttaagatcctgagctctggagtcagacttcccaaattccagtctggactctgccacttgcagctttgtggccttagataagttacttagcttcagtgactcagttttcccatggctaaaatgggaatgatcaagttttgagaattaaatgctagtgcatgttaggtgctataaatagcatataataactgctgaaaagtgtaaactattattgtaattattagtaagaaaatgtttaattattaattttttatcattgacctttaaatatacttgcttcagttatattttaaactttaaattattaacaatttgggccccatgctgtgtagcaggaggaactactgttataccacttaaatttttttcctagcttctttcttccaccagtctcaactttcattaataatagtttttctgtttgtcagatacttgtaatatttaacatcttttctgtgattataattttcatgttttagttttaattttatagtttaatggtgggtccagatctcaatgttagtacttttgtcatagcttctttattcatctcttggttagctgaagttgtttttcctgggattttgtcaaaaaattttcgaaattttggcaagttaacatgcttttcttgtatttgtactcaaataatagtttggtggggtataacattccagaatttcatttttttttccttgaaacattttatgcatttgttgtttcactgttctctttattcatattgctggtagaggtctgacgccagcctgcattttgcacccttttcatgtatttttgttaaactgcactctcacaataaaacattctttgaataatcaatcacgtgtttattatttactggatttttttcagtgtctgacctactctacacacatcaagggattcaatttctttggcattcagtaattgtactataatatggcttgacattgactgctctgttaaacttcccttggacacagtatgccttttcagtcattagattcaagttagcttttattactgggaagttatatataatgttcttgaaataagtaaaataatggagatcagttaaatacatatgggctctccactgcctaccttcgttgtcttttcatatctttaac

SEQ ID NO: 655 - DNA, 644 bp, Homo sapiens
gggaggctaaagtgagagaattgcttgagcccaggaggtcgagggtgcagtgagctgtgggcacaccactgcactccagcctggacaatagaacaagaccctgtcaaaaaaaaaaaaaagatggatcttgacatgggcgttaaataaacctttgctaaggtgagccactgagattttgagatttattggctactgaagcgtagtatatcccatcttaacagaaatactgtaataatatttataaagtcttaaattatttatcaatggtttataagtaacaaaaaggtaaacattagtcaaatgcctgtcagattttttcagatctccaggttgaccatgcttcactagagttgctgatgcttgatgggagcagcttccaaaaacattagcaggaggtattctaatttatttcttatgaagcacattttatcagtactctaaacatattcatcatggccctctctaaaccacaaaatcgttcaggaatagctctcaggtgtagacagtgcttattagtaggaataggttgaccccaaactcacgactcgtgcaacccactctagctgagctcctagctggcacaggggcactgtgctgcagggagcacacagtctgggctctgtcctgctagggctcacagcagc

SEQ ID NO: 656 - DNA, 644 bp, Homo sapiens
gggaggctaaagtgagagaattgcttgagcccaggaggtcgagggtgcagtgagctgtgggcacaccactgcactccagcctggacaatagaacaagaccctgtcaaaaaaaaaaaaaagatggatcttgacatgggcgttaaataaacctttgctaaggtgagccactgagattttgagatttattggctactgaagcgtagtatatcccatcttaacagaaatactgtaataatatttataaagtcttaaattatttatcaatggtttataagtaacaaaaaggtaaacattagtcaaatgcctgtcagattttttcagatctccaggttgaccatgcttcactagagttgctgatgcttgatgggagcagcttccaaaaacattagcaggaggtattctaatttatttcttatgaagcacattttatcagtactctaaacatattcatcatggccctctctaaaccacaaaatcattcaggaatagctctcaggtgtagacagtgcttattagtaggaataggttgaccccaaactcacgactcgtgcaacccactctagctgagctcctagctggcataggggcactgtgctgcagggagcacacagtctgggctctgtcctgctagggctcacagcagc

SEQ ID NO: 657 - DNA, 477 bp, Homo sapiens
gaagtagtaacactgttttgggcttggtgtagtggaaaagcccagctgggctttggaatcagacagagctggtgaggatgctaactagacccagtctacatgtgtaacctcctcagtttcttcacagctctgagcatcaatcgcctcaagtgtgaaatggggtgaaatggcacccacctctttggatttttgtgaggattaataagatgtgaataaagtgcttggtccatggtaagtactctgtgggtagcagttaatcacatgctgataggtaatcaatgtggcagatactgttagtgcccacccaatatccatggaagtatatcctctactccccagcttctcttgcagtttggggccatgagactggttctggcaatgagacaggagcaggtctgataaaagcttcagggactcccagcccatcatctccaacaccctcagcacagttcaagatggaccatgaggctgggtgtg

SEQ ID NO: 658 - DNA, 244 bp, Homo sapiens
aaattccagaacaaaaagtcactaagagttgatcctaggacacacaaggaatgtatgtacaatggattgatccataagtaaagtgcagggttgtttcaagtattcgaagcaaatagaaggtgtaatttaaatcattccagtcaaaagattgccttaagtaaatacacaattcttatattaaagttaggagaaggagaaccaggctcaaactgcagtttaaaggattttaaatgagatacatgaa

SEQ ID NO: 659 - DNA, 663 bp, Homo sapiens
tcaaaagtaggttgtggaagagtaggaagcattgcacctaaacttccatgattaactccatgtgttttactcaaagcatcaggttgctctttagacttcttggttgctttggaaattttgatggtgctttttggagagtggcttgggaagccaaaaaagagttgagggcaattactgctttaaccaaaacaatagaacagcaggaagttcagtgcagtcccctagcttctccccttctttactcatttaatactggagaagtctgtgaattatggtatacactgaatttccaacttcgtggacattggcccttttcattatcttaagctcttttcattgctccgtttctgggccttatgggaaatgattcaagcactccatggaagatgatcaattctcaagctaaccccaggcaagtatgaagaattctcccaaaatcacatgatagcaagctgataagatttctctcatcttcagtcagtgagaagaccaaactgcttcaacaagtttgcttcctcagggatgggtgtggtggctcactcctgtaatcccggcactttgggaggcccaggcaaaaacatcacttgagcccaggagttcgagaccagcttgggcaacagagtgaaaccccatctcaaaagaaaaagaaaaagaaaaaaaaaa

SEQ ID NO: 660 - DNA, 663 bp, Homo sapiens
tcaaaagtaggttgtggaagagtaggaagcattgcacctaaacttccatgattaactccatgtgttttactcaaagcatcaggttgctctttagacttcttggttgctttggaaattttgatggtgctttttggagagtggcttgggaagccaaaaaagagttgagggcaattactgctttaaccaaaacaatagaacagcaggaagttcagtgcagtcccctagcttctccccttctttactcatttaatactggagaagtctgtgaattatggtatacactgaatttccaacttcgtggacattggcccttttcattatcttaagctcttttcattgctccgtttctgggccttatgggaaatgattcaagcactccatggaagatgatcaattctcaagctaaccccaggcaagtatgaagaattctcccaaaatcacatgatagcaagctgataagatttctctcatcttcagtcagtgagaagaccaaactgcttcaacaagtttgcttcctcagggatgggtgtggtggctcactcctgtaatcccagcactttgggaggcccaggcaaaaacatcacttgagcccaggagttcgagaccagcttgggcaacagagtgaaaccccatctcaaaaagaaaagaaaaagaaaaaaaaaa

SEQ ID NO: 661 - DNA, 663 bp, Homo sapiens; identical to SEQ ID NO: 660

SEQ ID NO: 662 - DNA, 340 bp, Homo sapiens
attgaaactcttagcatttgtgaactggaaaatttggtggtgacagaactgtgtttctgtattagataagagatgttctaatagaatcctgctgctccttttgatggaataccgttctgaaattgcatccaaggatgaaaaagttggtaccgtggcaccctgtcaagtagctcctgttgctgtgaggtgtgattaaaagacacataagccagcagaaaatgtgacacaaagggcatctatataaaaaattaacagactacgtgatatcatttaggccagatttagaatcacaataaagaccttgttttagtctgttttgtgctactatcacagaatacca

SEQ ID NO: 663 - DNA, 340 bp, Homo sapiens; identical to SEQ ID NO: 662

SEQ ID NO: 664 - DNA, 340 bp, Homo sapiens; identical to SEQ ID NO: 662

SEQ ID NO: 665 - DNA, 176 bp, Homo sapiens
cttctgttcggggaggcgctgccaggaataacccggtgcgtccacagcccgggaggggaggcggccgctgcggctcccgcacgcagacagctgcggcccgggcctcgcggctcccgcctgagcccggcggcccctgccccgggcccatctccgtacagtgtcagaaaaataaataa

SEQ ID NO: 666 - DNA, 176 bp, Homo sapiens; identical to SEQ ID NO: 665

SEQ ID NO: 667 - DNA, 90 bp, Homo sapiens
cttttccctccctccgcgcccgccctccctctgtccttaaggaaatgctaccagacaccccccaccagacacgctcagccttggcgagga

SEQ ID NO: 668 - DNA, 90 bp, Homo sapiens; identical to SEQ ID NO: 667

SEQ ID NO: 669 - DNA, 408 bp, Homo sapiens
tttgtaatgcactcatttttaatgaaaagagaaggggatattttatatgtcctcacatttggtccctttccgcgaaatttgaaactggagacacaaaacattccgcagttgctggtgaaatacctgctttaaaagcagaaccacagttattgtctttggcccggaattccagagactcatttccacccctcccacggagtcacctgctcagggggaaccccggccagaaagccgggtcgcgccaggtcaaatcttgcgcgtctcttgtttactccgccccgggcagggcggcggcgcggccagggggtggggaggaccgctggggcccgcggcgtcctgggcgctcggctctgctccgcagggtgcgggggctggggcgcccgcgaggtgctgcgcgcggtccccgct

SEQ ID NO: 670 - DNA, 642 bp, Homo sapiens
ggttcatcaaggataatctcagctgggacaaaacagctctgttccatgtggtgtctcatttaccagcagactagcttggacttgttctcataatgatgacaaggtccaagagagaatggaagtttgtgagatgcgagcctatactcagatgttgtaggatgtcacttatgctgaattctactgtctaaagcaagtcacaaaactggcctagacttaaagtgtgagctaattccacctcctgataggaagacttatacaggtgcattgcagagggtatagataaagggaagagtagggaagtgtggctggttttgtaatctaccatactgactgcagtatagtttggtaagtgtggtgaggaaggcaacatctagattctaaaaagcattaaacaaatttcaacttagttaattcaatttcagcttagttttcctataacagggatgctactaaaggaaaaaagaaaaactgggttgtttatcttatattaggatcctactgtgtgttttctaaaatcattaagttatcaccagatgatgctgttttgcctacttaatacattactcagtttcatcctgagcccataaggaagttgtttactagtgtcgtcttatggcataggaagttgacgcataatacttt

SEQ ID NO: 671 - DNA, 642 bp, Homo sapiens; identical to SEQ ID NO: 670

SEQ ID NO: 672 - DNA, 414 bp, Homo sapiens
ggcaaagtggagcacatgaaccagacactcaaacagccactgaagaaatattgccaagagacccatctaaggtgggatcaggtcctacccatggtcctcctccgagtcaggtgcacccttaccaaacaactgggtattcaccctatgaaatcttgttcagccagccacccccaatcataggtcaaattaagggtgatctccgggagctaagggacttaaccttaagaaagcaaatgcagggcttagggatagccatgcaagatgtctatggctgggtacgggaaagaatgcccataagcctggcagacccagcacacccctttaaacccggggactctgtttgggtcaagaaattgaatccaaccactttgggacccctatgggatgggccccatactgtaatcttgtccactc

SEQ ID NO: 673 - DNA, 2236 bp, Homo sapiens
  misc_feature (242): n equals a,t,g, or c
  misc_feature (243): n equals a,t,g, or c
  misc_feature (244): n equals a,t,g, or c
  misc_feature (245): n equals a,t,g, or c
  misc_feature (246): n equals a,t,g, or c
  misc_feature (247): n equals a,t,g, or c
  misc_feature (248): n equals a,t,g, or c
  misc_feature (249): n equals a,t,g, or c
  misc_feature (250): n equals a,t,g, or c
  misc_feature (251): n equals a,t,g, or c
  misc_feature (252): n equals a,t,g, or c
  misc_feature (253): n equals a,t,g, or c
  misc_feature (254): n equals a,t,g, or c
  misc_feature (255): n equals a,t,g, or c
  misc_feature (256): n equals a,t,g, or c
  misc_feature (257): n equals a,t,g, or c
  misc_feature (258): n equals a,t,g, or c
  misc_feature (259): n equals a,t,g, or c
  misc_feature (260): n equals a,t,g, or c
  misc_feature (261): n equals a,t,g, or c
  misc_feature (262): n equals a,t,g, or c
  misc_feature (263): n equals a,t,g, or c
  misc_feature (264): n equals a,t,g, or c
  misc_feature (265): n equals a,t,g, or c
  misc_feature (266): n equals a,t,g, or c
  misc_feature (267): n equals a,t,g, or c
  misc_feature (268): n equals a,t,g, or c
  misc_feature (269): n equals a,t,g, or c
  misc_feature (270): n equals a,t,g, or c
  misc_feature (271): n equals a,t,g, or c
  misc_feature (272): n equals a,t,g, or c
  misc_feature (273): n equals a,t,g, or c
  misc_feature (274): n equals a,t,g, or c
  misc_feature (275): n equals a,t,g, or c
  misc_feature (276): n equals a,t,g, or c
  misc_feature (277): n equals a,t,g, or c
  misc_feature (278): n equals a,t,g, or c
  misc_feature (279): n equals a,t,g, or c
  misc_feature (280): n equals a,t,g, or c
  misc_feature (281): n equals a,t,g, or c
  misc_feature (282): n equals a,t,g, or c
  misc_feature (283): n equals a,t,g, or c
  misc_feature (284): n equals a,t,g, or c
  misc_feature (285): n equals a,t,g, or c
  misc_feature (286): n equals a,t,g, or c
  misc_feature (287): n equals a,t,g, or c
  misc_feature (288): n equals a,t,g, or c
  misc_feature (289): n equals a,t,g, or c
  misc_feature (290): n equals a,t,g, or c
  misc_feature (291): n equals a,t,g, or c
  misc_feature (292): n equals a,t,g, or c
  misc_feature (293): n equals a,t,g, or c
  misc_feature (294): n equals a,t,g, or c
  misc_feature (295): n equals a,t,g, or c
  misc_feature (296): n equals a,t,g, or c
  misc_feature (297): n equals a,t,g, or c
  misc_feature (298): n equals a,t,g, or c
  misc_feature (299): n equals a,t,g, or c
  misc_feature (300): n equals a,t,g, or c
  misc_feature (301): n equals a,t,g, or c
  misc_feature (302): n equals a,t,g, or c
  misc_feature (303): n equals a,t,g, or c
  misc_feature (304): n equals a,t,g, or c
  misc_feature (305): n equals a,t,g, or c
  misc_feature (306): n equals a,t,g, or c
  misc_feature (307): n equals a,t,g, or c
  misc_feature (308): n equals a,t,g, or c
  misc_feature (309): n equals a,t,g, or c
  misc_feature (310): n equals a,t,g, or c
  misc_feature (311): n equals a,t,g, or c
  misc_feature (312): n equals a,t,g, or c
  misc_feature (313): n equals a,t,g, or c
  misc_feature (314): n equals a,t,g, or c
  misc_feature (315): n equals a,t,g, or c
  misc_feature (316): n equals a,t,g, or c
  misc_feature (317): n equals a,t,g, or c
  misc_feature (318): n equals a,t,g, or c
  misc_feature (319): n equals a,t,g, or c
  misc_feature (320): n equals a,t,g, or c
  misc_feature (321): n equals a,t,g, or c
  misc_feature (322): n equals a,t,g, or c
  misc_feature (323): n equals a,t,g, or c
  misc_feature (324): n equals a,t,g, or c
  misc_feature (325): n equals a,t,g, or c
  misc_feature (326): n equals a,t,g, or c
  misc_feature (327): n equals a,t,g, or c
  misc_feature (328): n equals a,t,g, or c
  misc_feature (329): n equals a,t,g, or c
  misc_feature (330): n equals a,t,g, or c
  misc_feature (331): n equals a,t,g, or c
  misc_feature (332): n equals a,t,g, or c
  misc_feature (333): n equals a,t,g, or c
  misc_feature (334): n equals a,t,g, or c
  misc_feature (335): n equals a,t,g, or c
  misc_feature (336): n equals a,t,g, or c
  misc_feature (337): n equals a,t,g, or c
  misc_feature (338): n equals a,t,g, or c
  misc_feature (339): n equals a,t,g, or c
  misc_feature (340): n equals a,t,g, or c
  misc_feature (341): n equals a,t,g, or c
  misc_feature (342): n equals a,t,g, or c
  misc_feature (343): n equals a,t,g, or c
  misc_feature (344): n equals a,t,g, or c
  misc_feature (345): n equals a,t,g, or c
  misc_feature (346): n equals a,t,g, or c
  misc_feature (347): n equals a,t,g, or c
  misc_feature (348): n equals a,t,g, or c
  misc_feature (349): n equals a,t,g, or c
  misc_feature (350): n equals a,t,g, or c
  misc_feature (351): n equals a,t,g, or c
  misc_feature (352): n equals a,t,g, or c
  misc_feature (353): n equals a,t,g, or c
  misc_feature (354): n equals a,t,g, or c
  misc_feature (355): n equals a,t,g, or c
  misc_feature (356): n equals a,t,g, or c
  misc_feature (357): n equals a,t,g, or c
  misc_feature (358): n equals a,t,g, or c
  misc_feature (359): n equals a,t,g, or c
  misc_feature (360): n equals a,t,g, or c
  misc_feature (361): n equals a,t,g, or c
  misc_feature (362): n equals a,t,g, or c
  misc_feature (363): n equals a,t,g, or c
  misc_feature (364): n equals a,t,g, or c
  misc_feature (365): n equals a,t,g, or c
  misc_feature (366): n equals a,t,g, or c
  misc_feature (367): n equals a,t,g, or c
  misc_feature (368): n equals a,t,g, or c
  misc_feature (369): n equals a,t,g, or c
  misc_feature (370): n equals a,t,g, or c
  misc_feature (371): n equals a,t,g, or c
  misc_feature (372): n equals a,t,g, or c
  misc_feature (373): n equals a,t,g, or c
  misc_feature (374): n equals a,t,g, or c
  misc_feature (375): n equals a,t,g, or c
  misc_feature (376): n equals a,t,g, or c
  misc_feature (377): n equals a,t,g, or c
  misc_feature (378): n equals a,t,g, or c
  misc_feature (379): n equals a,t,g, or c
  misc_feature (380): n equals a,t,g, or c
  misc_feature (381): n equals a,t,g, or c
  misc_feature (382): n equals a,t,g, or c
  misc_feature (383): n equals a,t,g, or c
  misc_feature (384): n equals a,t,g, or c
  misc_feature (385): n equals a,t,g, or c
  misc_feature (386): n equals a,t,g, or c
  misc_feature (387): n equals a,t,g, or c
  misc_feature (388): n equals a,t,g, or c
  misc_feature (389): n equals a,t,g, or c
  misc_feature (390): n equals a,t,g, or c
  misc_feature (391): n equals a,t,g, or c
  misc_feature (392): n equals a,t,g, or c
  misc_feature (393): n equals a,t,g, or c
  misc_feature (394): n equals a,t,g, or c
  misc_feature (395): n equals a,t,g, or c
  misc_feature (396): n equals a,t,g, or c
  misc_feature (397): n equals a,t,g, or c
  misc_feature (398): n equals a,t,g, or c
  misc_feature (399): n equals a,t,g, or c
  misc_feature (400): n equals a,t,g, or c
  misc_feature (401): n equals a,t,g, or c
  misc_feature (402): n equals a,t,g, or c
  misc_feature (403): n equals a,t,g, or c
  misc_feature (404): n equals a,t,g, or c
  misc_feature (405): n equals a,t,g, or c
  misc_feature (406): n equals a,t,g, or c
  misc_feature (407): n equals a,t,g, or c
  misc_feature (408): n equals a,t,g, or c
  misc_feature (409): n equals a,t,g, or c
  misc_feature (410): n equals a,t,g, or c
  misc_feature (411): n equals a,t,g, or c
  misc_feature (412): n equals a,t,g, or c
  misc_feature (413): n equals a,t,g, or c
  misc_feature (414): n equals a,t,g, or c
  misc_feature (415): n equals a,t,g, or c
  misc_feature (416): n equals a,t,g, or c
  misc_feature (417): n equals a,t,g, or c
  misc_feature (418): n equals a,t,g, or c
  misc_feature (419): n equals a,t,g, or c
  misc_feature (420): n equals a,t,g, or c
  misc_feature (421): n equals a,t,g, or c
  misc_feature (422): n equals a,t,g, or c
  misc_feature (423): n equals a,t,g, or c
  misc_feature (424): n equals a,t,g, or c
  misc_feature (425): n equals a,t,g, or c
  misc_feature (426): n equals a,t,g, or c
  misc_feature (427): n equals a,t,g, or c
  misc_feature (428): n equals a,t,g, or c
  misc_feature (429): n equals a,t,g, or c
  misc_feature (430): n equals a,t,g, or c
  misc_feature (431): n equals a,t,g, or c
  misc_feature (432): n equals a,t,g, or c
  misc_feature (433): n equals a,t,g, or c
  misc_feature (434): n equals a,t,g, or c
  misc_feature (435): n equals a,t,g, or c
  misc_feature (436): n equals a,t,g, or c
  misc_feature (437): n equals a,t,g, or c
  misc_feature (438): n equals a,t,g, or c
  misc_feature (439): n equals a,t,g, or c
  misc_feature (440): n equals a,t,g, or c
  misc_feature (441): n equals a,t,g, or c
  misc_feature (442): n equals a,t,g, or c
  misc_feature (443): n equals a,t,g, or c
  misc_feature (444): n equals a,t,g, or c
  misc_feature (445): n equals a,t,g, or c
  misc_feature (446): n equals a,t,g, or c
  misc_feature (447): n equals a,t,g, or c
  misc_feature (448): n equals a,t,g, or c
  misc_feature (449): n equals a,t,g, or c
  misc_feature (450): n equals a,t,g, or c
  misc_feature (451): n equals a,t,g, or c
  misc_feature (452): n equals a,t,g, or c
  misc_feature (453): n equals a,t,g, or c
  misc_feature (454): n equals a,t,g, or c
  misc_feature (455): n equals a,t,g, or c
  misc_feature (456): n equals a,t,g, or c
  misc_feature (457): n equals a,t,g, or c
  misc_feature (458): n equals a,t,g, or c
  misc_feature (459): n equals a,t,g, or c
  misc_feature (460): n equals a,t,g, or c
  misc_feature (461): n equals a,t,g, or c
  misc_feature (462): n equals a,t,g, or c
  misc_feature (463): n equals a,t,g, or c
  misc_feature (464): n equals a,t,g, or c
  misc_feature (465): n equals a,t,g, or c
  misc_feature (466): n equals a,t,g, or c
  misc_feature (467): n equals a,t,g, or c
  misc_feature (468): n equals a,t,g, or c
  misc_feature (469): n equals a,t,g, or c
  misc_feature (470): n equals a,t,g, or c
  misc_feature (471): n equals a,t,g, or c
  misc_feature (472): n equals a,t,g, or c
  misc_feature (473): n equals a,t,g, or c
  misc_feature (474): n equals a,t,g, or c
  misc_feature (475): n equals a,t,g, or c
  misc_feature (476): n equals a,t,g, or c
  misc_feature (477): n equals a,t,g, or c
  misc_feature (478): n equals a,t,g, or c
  misc_feature (479): n equals a,t,g, or c
  misc_feature (480): n equals a,t,g, or c
  misc_feature (481): n equals a,t,g, or c
  misc_feature (482): n equals a,t,g, or c
  misc_feature (483): n equals a,t,g, or c
  misc_feature (484): n equals a,t,g, or c
  misc_feature (485): n equals a,t,g, or c
  misc_feature (486): n equals a,t,g, or c
  misc_feature (487): n equals a,t,g, or c
  misc_feature (488): n equals a,t,g, or c
  misc_feature (489): n equals a,t,g, or c
  misc_feature (490): n equals a,t,g, or c
  misc_feature (491): n equals a,t,g, or c
  misc_feature (492): n equals a,t,g, or c
  misc_feature (493): n equals a,t,g, or c
  misc_feature (494): n equals a,t,g, or c
  misc_feature (495): n equals a,t,g, or c
  misc_feature (496): n equals a,t,g, or c
  misc_feature (497): n equals a,t,g, or c
  misc_feature (498): n equals a,t,g, or c
  misc_feature (499): n equals a,t,g, or c
  misc_feature (500): n equals a,t,g, or c
  misc_feature (501): n equals a,t,g, or c
  misc_feature (502): n equals a,t,g, or c
  misc_feature (503): n equals a,t,g, or c
  misc_feature (504): n equals a,t,g, or c
  misc_feature (505): n equals a,t,g, or c
  misc_feature (506): n equals a,t,g, or c
  misc_feature (507): n equals a,t,g, or c
  misc_feature (508): n equals a,t,g, or c
  misc_feature (509): n equals a,t,g, or c
  misc_feature (510): n equals a,t,g, or c
  misc_feature (511): n equals a,t,g, or c
  misc_feature (512): n equals a,t,g, or c
  misc_feature (513): n equals a,t,g, or c
  misc_feature (514): n equals a,t,g, or c
  misc_feature (515): n equals a,t,g, or c
  misc_feature (516): n equals a,t,g, or c
  misc_feature (517): n equals a,t,g, or c
  misc_feature (518): n equals a,t,g, or c
  misc_feature (519): n equals a,t,g, or c
  misc_feature (520): n equals a,t,g, or c
  misc_feature (521): n equals a,t,g, or c
  misc_feature (522): n equals a,t,g, or c
  misc_feature (523): n equals a,t,g, or c
  misc_feature (524): n equals a,t,g, or c
  misc_feature (525): n equals a,t,g, or c
  misc_feature (526): n equals a,t,g, or c
  misc_feature (527): n equals a,t,g, or c
  misc_feature (528): n equals a,t,g, or c
  misc_feature (529): n equals a,t,g, or c
  misc_feature (530): n equals a,t,g, or c
  misc_feature (531): n equals a,t,g, or c
  misc_feature (532): n equals a,t,g, or c
  misc_feature (533): n equals a,t,g, or c
  misc_feature (534): n equals a,t,g, or c
  misc_feature (535): n equals a,t,g, or c
  misc_feature (536): n equals a,t,g, or c
  misc_feature (537): n equals a,t,g, or c
  misc_feature (538): n equals a,t,g, or c
  misc_feature (539): n equals a,t,g, or c
  misc_feature (540): n equals a,t,g, or c
  misc_feature (541): n equals a,t,g, or c
  misc_feature (542): n equals a,t,g, or c
  misc_feature (543): n equals a,t,g, or c
  misc_feature (544): n equals a,t,g, or c
  misc_feature (545): n equals a,t,g, or c
  misc_feature (546): n equals a,t,g, or c
  misc_feature (547): n equals a,t,g, or c
  misc_feature (548): n equals a,t,g, or c
  misc_feature (549): n equals a,t,g, or c
  misc_feature (550): n equals a,t,g, or c
  misc_feature (551): n equals a,t,g, or c
  misc_feature (552): n equals a,t,g, or c
  misc_feature (553): n equals a,t,g, or c
  misc_feature (554): n equals a,t,g, or c
  misc_feature (555): n equals a,t,g, or c
  misc_feature (556): n equals a,t,g, or c
  misc_feature (557): n equals a,t,g, or c
  misc_feature (558): n equals a,t,g, or c
  misc_feature (559): n equals a,t,g, or c
  misc_feature (560): n equals a,t,g, or c
  misc_feature (561): n equals a,t,g, or c
  misc_feature (562): n equals a,t,g, or c
  misc_feature (563): n equals a,t,g, or c
  misc_feature (564): n equals a,t,g, or c
  misc_feature (565): n equals a,t,g, or c
  misc_feature (566): n equals a,t,g, or c
  misc_feature (567): n equals a,t,g, or c
  misc_feature (568): n equals a,t,g, or c
  misc_feature (569): n equals a,t,g, or c
  misc_feature (570): n equals a,t,g, or c
  misc_feature (571): n equals a,t,g, or c
  misc_feature (572): n equals a,t,g, or c
  misc_feature (573): n equals a,t,g, or c
  misc_feature (574): n equals a,t,g, or c
  misc_feature (575): n equals a,t,g, or c
  misc_feature (576): n equals a,t,g, or c
  misc_feature (577): n equals a,t,g, or c
  misc_feature (578): n equals a,t,g, or c
  misc_feature (579): n equals a,t,g, or c
  misc_feature (580): n equals a,t,g, or c
  misc_feature (581): n equals a,t,g, or c
  misc_feature (582): n equals a,t,g, or c
  misc_feature (583): n equals a,t,g, or c
  misc_feature (584): n equals a,t,g, or c
  misc_feature (585): n equals a,t,g, or c
  misc_feature (586): n equals a,t,g, or c
  misc_feature (587): n equals a,t,g, or c
  misc_feature (588): n equals a,t,g, or c
  misc_feature (589): n equals a,t,g, or c
  misc_feature (590): n equals a,t,g, or c
  misc_feature (591): n equals a,t,g, or c
  misc_feature (592): n equals a,t,g, or c
  misc_feature (593): n equals a,t,g, or c
  misc_feature (594): n equals a,t,g, or c
  misc_feature (595): n equals a,t,g, or c
  misc_feature (596): n equals a,t,g, or c
  misc_feature (597): n equals a,t,g, or c
  misc_feature (598): n equals a,t,g, or c
  misc_feature (599): n equals a,t,g, or c
  misc_feature (600): n equals a,t,g, or c
  misc_feature (601): n equals a,t,g, or c
  misc_feature (602): n equals a,t,g, or c
  misc_feature (603): n equals a,t,g, or c
  misc_feature (604): n equals a,t,g, or c
  misc_feature (605): n equals a,t,g, or c
  misc_feature (606): n equals a,t,g, or c
  misc_feature (607): n equals a,t,g, or c
  misc_feature (608): n equals a,t,g, or c
  misc_feature (609): n equals a,t,g, or c
  misc_feature (610): n equals a,t,g, or c
  misc_feature (611): n equals a,t,g, or c
  misc_feature (612): n equals a,t,g, or c
  misc_feature (613): n equals a,t,g, or c
  misc_feature (614): n equals a,t,g, or c
  misc_feature (615): n equals a,t,g, or c
  misc_feature (616): n equals a,t,g, or c
  misc_feature (617): n equals a,t,g, or c
  misc_feature (618): n equals a,t,g, or c
  misc_feature (619): n equals a,t,g, or c
  misc_feature (620): n equals a,t,g, or c
  misc_feature (621): n equals a,t,g, or c
  misc_feature (622): n equals a,t,g, or c
  misc_feature (623): n equals a,t,g, or c
  misc_feature (624): n equals a,t,g, or c
  misc_feature (625): n equals a,t,g, or c
  misc_feature (626): n equals a,t,g, or c
  misc_feature (627): n equals a,t,g, or c
  misc_feature (628): n equals a,t,g, or c
  misc_feature (629): n equals a,t,g, or c
  misc_feature (630): n equals a,t,g, or c
  misc_feature (631): n equals a,t,g, or c
  misc_feature (632): n equals a,t,g, or c
  misc_feature (633): n equals a,t,g, or c
  misc_feature (634): n equals a,t,g, or c
  misc_feature (635): n equals a,t,g, or c
  misc_feature (636): n equals a,t,g, or c
  misc_feature (637): n equals a,t,g, or c
  misc_feature (638): n equals a,t,g, or c
  misc_feature (639): n equals a,t,g, or c
  misc_feature (640): n equals a,t,g, or c
  misc_feature (641): n equals a,t,g, or c
  misc_feature (642): n equals a,t,g, or c
  misc_feature (643): n equals a,t,g, or c
  misc_feature (644): n equals a,t,g, or c
  misc_feature (645): n equals a,t,g, or c
  misc_feature (646): n equals a,t,g, or c
  misc_feature (647): n equals a,t,g, or c
  misc_feature (648): n equals a,t,g, or c
  misc_feature (649): n equals a,t,g, or c
  misc_feature (650): n equals a,t,g, or c
  misc_feature (651): n equals a,t,g, or c
  misc_feature (652): n equals a,t,g, or c
  misc_feature (653): n equals a,t,g, or c
  misc_feature (654): n equals a,t,g, or c
  misc_feature (655): n equals a,t,g, or c
  misc_feature (656): n equals a,t,g, or c
  misc_feature (657): n equals a,t,g, or c
  misc_feature (658): n equals a,t,g, or c
  misc_feature (659): n equals a,t,g, or c
  misc_feature (660): n equals a,t,g, or c
  misc_feature (661): n equals a,t,g, or c
  misc_feature (662): n equals a,t,g, or c
  misc_feature (663): n equals a,t,g, or c
  misc_feature (664): n equals a,t,g, or c
  misc_feature (665): n equals a,t,g, or c
  misc_feature (666): n equals a,t,g, or c
  misc_feature (667): n equals a,t,g, or c
  misc_feature (668): n equals a,t,g, or c
  misc_feature (669): n equals a,t,g, or c
  misc_feature (670): n equals a,t,g, or c
  misc_feature (671): n equals a,t,g, or c
  misc_feature (672): n equals a,t,g, or c
  misc_feature (673): n equals a,t,g, or c
  misc_feature (674): n equals a,t,g, or c
  misc_feature (675): n equals a,t,g, or c
  misc_feature (676): n equals a,t,g, or c
  misc_feature (677): n equals a,t,g, or c
  misc_feature (678): n equals a,t,g, or c
  misc_feature (679): n equals a,t,g, or c
  misc_feature (680): n equals a,t,g, or c
  misc_feature (681): n equals a,t,g, or c
  misc_feature (682): n equals a,t,g, or c
  misc_feature (683): n equals a,t,g, or c
  misc_feature (684): n equals a,t,g, or c
  misc_feature (685): n equals a,t,g, or c
  misc_feature (686): n equals a,t,g, or c
  misc_feature (687): n equals a,t,g, or c
  misc_feature (688): n equals a,t,g, or c
  misc_feature (689): n equals a,t,g, or c
  misc_feature (690): n equals a,t,g, or c
  misc_feature (691): n equals a,t,g, or c
  misc_feature (692): n equals a,t,g, or c
  misc_feature (693): n equals a,t,g, or c
  misc_feature (694): n equals a,t,g, or c
  misc_feature (695): n equals a,t,g, or c
  misc_feature (696): n equals a,t,g, or c
  misc_feature (697): n equals a,t,g, or c
  misc_feature (698): n equals a,t,g, or c
  misc_feature (699): n equals a,t,g, or c
  misc_feature (700): n equals a,t,g, or c
  misc_feature (701): n equals a,t,g, or c
  misc_feature (702): n equals a,t,g, or c
  misc_feature (703): n equals a,t,g, or c
  misc_feature (704): n equals a,t,g, or c
  misc_feature (705): n equals a,t,g, or c
  misc_feature (706): n equals a,t,g, or c
  misc_feature (707): n equals a,t,g, or c
  misc_feature (708): n equals a,t,g, or c
  misc_feature (709): n equals a,t,g, or c
  misc_feature (710): n equals a,t,g, or c
  misc_feature (711): n equals a,t,g, or c
  misc_feature (712): n equals a,t,g, or c
  misc_feature (713): n equals a,t,g, or c
  misc_feature (714): n equals a,t,g, or c
  misc_feature (715): n equals a,t,g, or c
  misc_feature (716): n equals a,t,g, or c
  misc_feature (717): n equals a,t,g, or c
  misc_feature (718): n equals a,t,g, or c
  misc_feature (719): n equals a,t,g, or c
  misc_feature (720): n equals a,t,g, or c
  misc_feature (721): n equals a,t,g, or c
  misc_feature (722): n equals a,t,g, or c
  misc_feature (723): n equals a,t,g, or c
  misc_feature (724): n equals a,t,g, or c
  misc_feature (725): n equals a,t,g, or c
  misc_feature (726): n equals a,t,g, or c
  misc_feature (727): n equals a,t,g, or c
  misc_feature (728): n equals a,t,g, or c
  misc_feature (729): n equals a,t,g, or c
  misc_feature (730): n equals a,t,g, or c
  misc_feature (731): n equals a,t,g, or c
  misc_feature (732): n equals a,t,g, or c
  misc_feature (733): n equals a,t,g, or c
  misc_feature (734): n equals a,t,g, or c
  misc_feature (735): n equals a,t,g, or c
  misc_feature (736): n equals a,t,g, or c
  misc_feature (737): n equals a,t,g, or c
  misc_feature (738): n equals a,t,g, or c
  misc_feature (739): n equals a,t,g, or c
  misc_feature (740): n equals a,t,g, or c
  misc_feature (741): n equals a,t,g, or c
  misc_feature (742): n equals a,t,g, or c
  misc_feature (743): n equals a,t,g, or c
  misc_feature (744): n equals a,t,g, or c
  misc_feature (745): n equals a,t,g, or c
  misc_feature (746): n equals a,t,g, or c
  misc_feature (747): n equals a,t,g, or c
  misc_feature (748): n equals a,t,g, or c
  misc_feature (749): n equals a,t,g, or c
  misc_feature (750): n equals a,t,g, or c
  misc_feature (751): n equals a,t,g, or c
  misc_feature (752): n equals a,t,g, or c
  misc_feature (753): n equals a,t,g, or c
  misc_feature (754): n equals a,t,g, or c
  misc_feature (755): n equals a,t,g, or c
  misc_feature (756): n equals a,t,g, or c
  misc_feature (757): n equals a,t,g, or c
  misc_feature (758): n equals a,t,g, or c
  misc_feature (759): n equals a,t,g, or c
  misc_feature (760): n equals a,t,g, or c
  misc_feature (761): n equals a,t,g, or c
  misc_feature (762): n equals a,t,g, or c
  misc_feature (763): n equals a,t,g, or c
  misc_feature (764): n equals a,t,g, or c
  misc_feature (765): n equals a,t,g, or c
  misc_feature (766): n equals a,t,g, or c
  misc_feature (767): n equals a,t,g, or c
  misc_feature (768): n equals a,t,g, or c
  misc_feature (769): n equals a,t,g, or c
  misc_feature (770): n equals a,t,g, or c
  misc_feature (771): n equals a,t,g, or c
  misc_feature (772): n equals a,t,g, or c
  misc_feature (773): n equals a,t,g, or c
  misc_feature (774): n equals a,t,g, or c
  misc_feature (775): n equals a,t,g, or c
  misc_feature (776): n equals a,t,g, or c
  misc_feature (777): n equals a,t,g, or c
  misc_feature (778): n equals a,t,g, or c
  misc_feature (779): n equals a,t,g, or c
  misc_feature (780): n equals a,t,g, or c
  misc_feature (781): n equals a,t,g, or c
  misc_feature (782): n equals a,t,g, or c
  misc_feature (783): n equals a,t,g, or c
  misc_feature (784): n equals a,t,g, or c
  misc_feature (785): n equals a,t,g, or c
  misc_feature (786): n equals a,t,g, or c
  misc_feature (787): n equals a,t,g, or c
  misc_feature (788): n equals a,t,g, or c
  misc_feature (789): n equals a,t,g, or c
  misc_feature (790): n equals a,t,g, or c
  misc_feature (791): n equals a,t,g, or c
  misc_feature (792): n equals a,t,g, or c
  misc_feature (793): n equals a,t,g, or c
  misc_feature (794): n equals a,t,g, or c
  misc_feature (795): n equals a,t,g, or c
  misc_feature (796): n equals a,t,g, or c
  misc_feature (797): n equals a,t,g, or c
  misc_feature (798): n equals a,t,g, or c
  misc_feature (799): n equals a,t,g, or c
  misc_feature (800): n equals a,t,g, or c
  misc_feature (801): n equals a,t,g, or c
  misc_feature (802): n equals a,t,g, or c
  misc_feature (803): n equals a,t,g, or c
  misc_feature (804): n equals a,t,g, or c
  misc_feature (805): n equals a,t,g, or c
  misc_feature (806): n equals a,t,g, or c
  misc_feature (807): n equals a,t,g, or c
  misc_feature (808): n equals a,t,g, or c
  misc_feature (809): n equals a,t,g, or c
  misc_feature (810): n equals a,t,g, or c
  misc_feature (811): n equals a,t,g, or c
  misc_feature (812): n equals a,t,g, or c
  misc_feature (813): n equals a,t,g, or c
  misc_feature (814): n equals a,t,g, or c
  misc_feature (815): n equals a,t,g, or c
  misc_feature (816): n equals a,t,g, or c
  misc_feature (817): n equals a,t,g, or c
  misc_feature (818): n equals a,t,g, or c
  misc_feature (819): n equals a,t,g, or c
  misc_feature (820): n equals a,t,g, or c
  misc_feature (821): n equals a,t,g, or c
  misc_feature (822): n equals a,t,g, or c
  misc_feature (823): n equals a,t,g, or c
  misc_feature (824): n equals a,t,g, or c
  misc_feature (825): n equals a,t,g, or c
  misc_feature (826): n equals a,t,g, or c
  misc_feature (827): n equals a,t,g, or c
  misc_feature (828): n equals a,t,g, or c
  misc_feature (829): n equals a,t,g, or c
  misc_feature (830): n equals a,t,g, or c
  misc_feature (831): n equals a,t,g, or c
  misc_feature (832): n equals a,t,g, or c
  misc_feature (833): n equals a,t,g, or c
  misc_feature (834): n equals a,t,g, or c
  misc_feature (835): n equals a,t,g, or c
  misc_feature (836): n equals a,t,g, or c
  misc_feature (837): n equals a,t,g, or c
  misc_feature (838): n equals a,t,g, or c
  misc_feature (839): n equals a,t,g, or c
  misc_feature (840): n equals a,t,g, or c
  misc_feature (841): n equals a,t,g, or c
  misc_feature (842): n equals a,t,g, or c
  misc_feature (843): n equals a,t,g, or c
  misc_feature (844): n equals a,t,g, or c
  misc_feature (845): n equals a,t,g, or c
  misc_feature (846): n equals a,t,g, or c
  misc_feature (847): n equals a,t,g, or c
  misc_feature (848): n equals a,t,g, or c
  misc_feature (849): n equals a,t,g, or c
  misc_feature (850): n equals a,t,g, or c
  misc_feature (851): n equals a,t,g, or c
  misc_feature (852): n equals a,t,g, or c
  misc_feature (853): n equals a,t,g, or c
  misc_feature (854): n equals a,t,g, or c
  misc_feature (855): n equals a,t,g, or c
  misc_feature (856): n equals a,t,g, or c
  misc_feature (857): n equals a,t,g, or c
  misc_feature (858): n equals a,t,g, or c
  misc_feature (859): n equals a,t,g, or c
  misc_feature (860): n equals a,t,g, or c
  misc_feature (861): n equals a,t,g, or c
  misc_feature (862): n equals a,t,g, or c
  misc_feature (863): n equals a,t,g, or c
  misc_feature (864): n equals a,t,g, or c
  misc_feature (865): n equals a,t,g, or c
  misc_feature (866): n equals a,t,g, or c
  misc_feature (867): n equals a,t,g, or c
  misc_feature (868): n equals a,t,g, or c
  misc_feature (869): n equals a,t,g, or c
  misc_feature (870): n equals a,t,g, or c
  misc_feature (871): n equals a,t,g, or c
  misc_feature (872): n equals a,t,g, or c
  misc_feature (873): n equals a,t,g, or c
  misc_feature (874): n equals a,t,g, or c
  misc_feature (875): n equals a,t,g, or c
  misc_feature (876): n equals a,t,g, or c
  misc_feature (877): n equals a,t,g, or c
  misc_feature (878): n equals a,t,g, or c
  misc_feature (879): n equals a,t,g, or c
  misc_feature (880): n equals a,t,g, or c
  misc_feature (881): n equals a,t,g, or c
  misc_feature (882): n equals a,t,g, or c
  misc_feature (883): n equals a,t,g, or c
  misc_feature (884): n equals a,t,g, or c
  misc_feature (885): n equals a,t,g, or c
  misc_feature (886): n equals a,t,g, or c
  misc_feature (887): n equals a,t,g, or c
  misc_feature (888): n equals a,t,g, or c
  misc_feature (889): n equals a,t,g, or c
  misc_feature (890): n equals a,t,g, or c
  misc_feature (891): n equals a,t,g, or c
  misc_feature (892): n equals a,t,g, or c
  misc_feature (893): n equals a,t,g, or c
  misc_feature (894): n equals a,t,g, or c
  misc_feature (895): n equals a,t,g, or c
  misc_feature (896): n equals a,t,g, or c
  misc_feature (897): n equals a,t,g, or c
  misc_feature (898): n equals a,t,g, or c
  misc_feature (899): n equals a,t,g, or c
  misc_feature (900): n equals a,t,g, or c
  misc_feature (901): n equals a,t,g, or c
  misc_feature (902): n equals a,t,g, or c
  misc_feature (903): n equals a,t,g, or c
  misc_feature (904): n equals a,t,g, or c
  misc_feature (905): n equals a,t,g, or c
  misc_feature (906): n equals a,t,g, or c
  misc_feature (907): n equals a,t,g, or c
  misc_feature (908): n equals a,t,g, or c
  misc_feature (909): n equals a,t,g, or c
  misc_feature (910): n equals a,t,g, or c
  misc_feature (911): n equals a,t,g, or c
  misc_feature (912): n equals a,t,g, or c
  misc_feature (913): n equals a,t,g, or c
  misc_feature (914): n equals a,t,g, or c
  misc_feature (915): n equals a,t,g, or c
  misc_feature (916): n equals a,t,g, or c
  misc_feature (917): n equals a,t,g, or c
  misc_feature (918): n equals a,t,g, or c
  misc_feature (919): n equals a,t,g, or c
  misc_feature (920): n equals a,t,g, or c
  misc_feature (921): n equals a,t,g, or c
  misc_feature (922): n equals a,t,g, or c
  misc_feature (923): n equals a,t,g, or c
  misc_feature (924): n equals a,t,g, or c
  misc_feature (925): n equals a,t,g, or c
  misc_feature (926): n equals a,t,g, or c
  misc_feature (927): n equals a,t,g, or c
  misc_feature (928): n equals a,t,g, or c
  misc_feature (929): n equals a,t,g, or c
  misc_feature (930): n equals a,t,g, or c
  misc_feature (931): n equals a,t,g, or c
  misc_feature (932): n equals a,t,g, or c
  misc_feature (933): n equals a,t,g, or c
  misc_feature (934): n equals a,t,g, or c
  misc_feature (935): n equals a,t,g, or c
  misc_feature (936): n equals a,t,g, or c
  misc_feature (937): n equals a,t,g, or c
  misc_feature (938): n equals a,t,g, or c
  misc_feature (939): n equals a,t,g, or c
  misc_feature (940): n equals a,t,g, or c
  misc_feature (941): n equals a,t,g, or c
  misc_feature (942): n equals a,t,g, or c
  misc_feature (943): n equals a,t,g, or c
  misc_feature (944): n equals a,t,g, or c
  misc_feature (945): n equals a,t,g, or c
  misc_feature (946): n equals a,t,g, or c
  misc_feature (947): n equals a,t,g, or c
  misc_feature (948): n equals a,t,g, or c
  misc_feature (949): n equals a,t,g, or c
  misc_feature (950): n equals a,t,g, or c
  misc_feature (951): n equals a,t,g, or c
  misc_feature (952): n equals a,t,g, or c
  misc_feature (953): n equals a,t,g, or c
  misc_feature (954): n equals a,t,g, or c
  misc_feature (955): n equals a,t,g, or c
  misc_feature (956): n equals a,t,g, or c
  misc_feature (957): n equals a,t,g, or c
  misc_feature (958): n equals a,t,g, or c
  misc_feature (959): n equals a,t,g, or c
  misc_feature (960): n equals a,t,g, or c
  misc_feature (961): n equals a,t,g, or c
  misc_feature (962): n equals a,t,g, or c
  misc_feature (963): n equals a,t,g, or c
  misc_feature (964): n equals a,t,g, or c
  misc_feature (965): n equals a,t,g, or c
  misc_feature (966): n equals a,t,g, or c
  misc_feature (967): n equals a,t,g, or c
  misc_feature (968): n equals a,t,g, or c
  misc_feature (969): n equals a,t,g, or c
  misc_feature (970): n equals a,t,g, or c
  misc_feature (971): n equals a,t,g, or c
  misc_feature (972): n equals a,t,g, or c
  misc_feature (973): n equals a,t,g, or c
  misc_feature (974): n equals a,t,g, or c
  misc_feature (975): n equals a,t,g, or c
  misc_feature (976): n equals a,t,g, or c
  misc_feature (977): n equals a,t,g, or c
  misc_feature (978): n equals a,t,g, or c
  misc_feature (979): n equals a,t,g, or c
  misc_feature (980): n equals a,t,g, or c
  misc_feature (981): n equals a,t,g, or c
  misc_feature (982): n equals a,t,g, or c
  misc_feature (983): n equals a,t,g, or c
  misc_feature (984): n equals a,t,g, or c
  misc_feature (985): n equals a,t,g, or c
  misc_feature (986): n equals a,t,g, or c
  misc_feature (987): n equals a,t,g, or c
  misc_feature (988): n equals a,t,g, or c
  misc_feature (989): n equals a,t,g, or c
  misc_feature (990): n equals a,t,g, or c
  misc_feature (991): n equals a,t,g, or c
  misc_feature (992): n equals a,t,g, or c
  misc_feature (993): n equals a,t,g, or c
  misc_feature (994): n equals a,t,g, or c
  misc_feature (995): n equals a,t,g, or c
  misc_feature (996): n equals a,t,g, or c
  misc_feature (997): n equals a,t,g, or c
  misc_feature (998): n equals a,t,g, or c
  misc_feature (999): n equals a,t,g, or c
  misc_feature (1000): n equals a,t,g, or c
  misc_feature (1001): n equals a,t,g, or c
  misc_feature (1002): n equals a,t,g, or c
  misc_feature (1003): n equals a,t,g, or c
  misc_feature (1004): n equals a,t,g, or c
  misc_feature (1005): n equals a,t,g, or c
  misc_feature (1006): n equals a,t,g, or c
  misc_feature (1007): n equals a,t,g, or c
  misc_feature (1008): n equals a,t,g, or c
  misc_feature (1009): n equals a,t,g, or c
  misc_feature (1010): n equals a,t,g, or c
  misc_feature (1011): n equals a,t,g, or c
  misc_feature (1012): n equals a,t,g, or c
  misc_feature (1013): n equals a,t,g, or c
  misc_feature (1014): n equals a,t,g, or c
  misc_feature (1015): n equals a,t,g, or c
  misc_feature (1016): n equals a,t,g, or c
  misc_feature (1017): n equals a,t,g, or c
  misc_feature (1018): n equals a,t,g, or c
  misc_feature (1019): n equals a,t,g, or c
  misc_feature (1020): n equals a,t,g, or c
  misc_feature (1021): n equals a,t,g, or c
  misc_feature (1022): n equals a,t,g, or c
  misc_feature (1023): n equals a,t,g, or c
  misc_feature (1024): n equals a,t,g, or c
  misc_feature (1025): n equals a,t,g, or c
  misc_feature (1026): n equals a,t,g, or c
  misc_feature (1027): n equals a,t,g, or c
  misc_feature (1028): n equals a,t,g, or c
  misc_feature (1029): n equals a,t,g, or c
  misc_feature (1030): n equals a,t,g, or c
  misc_feature (1031): n equals a,t,g, or c
  misc_feature (1032): n equals a,t,g, or c
  misc_feature (1033): n equals a,t,g, or c
  misc_feature (1034): n equals a,t,g, or c
  misc_feature (1035): n equals a,t,g, or c
  misc_feature (1036): n equals a,t,g, or c
  misc_feature (1037): n equals a,t,g, or c
  misc_feature (1038): n equals a,t,g, or c
  misc_feature (1039): n equals a,t,g, or c
  misc_feature (1040): n equals a,t,g, or c
  misc_feature (1041): n equals a,t,g, or c
  misc_feature (1042): n equals a,t,g, or c
  misc_feature (1043): n equals a,t,g, or c
  misc_feature (1044): n equals a,t,g, or c
  misc_feature (1045): n equals a,t,g, or c
  misc_feature (1046): n equals a,t,g, or c
  misc_feature (1047): n equals a,t,g, or c
  misc_feature (1048): n equals a,t,g, or c
  misc_feature (1049): n equals a,t,g, or c
  misc_feature (1050): n equals a,t,g, or c
  misc_feature (1051): n equals a,t,g, or c
  misc_feature (1052): n equals a,t,g, or c
  misc_feature (1053): n equals a,t,g, or c
  misc_feature (1054): n equals a,t,g, or c
  misc_feature (1055): n equals a,t,g, or c
  misc_feature (1056): n equals a,t,g, or c
  misc_feature (1057): n equals a,t,g, or c
  misc_feature (1058): n equals a,t,g, or c
  misc_feature (1059): n equals a,t,g, or c
  misc_feature (1060): n equals a,t,g, or c
  misc_feature (1061): n equals a,t,g, or c
  misc_feature (1062): n equals a,t,g, or c
  misc_feature (1063): n equals a,t,g, or c
  misc_feature (1064): n equals a,t,g, or c
  misc_feature (1065): n equals a,t,g, or c
  misc_feature (1066): n equals a,t,g, or c
  misc_feature (1067): n equals a,t,g, or c
  misc_feature (1068): n equals a,t,g, or c
  misc_feature (1069): n equals a,t,g, or c
  misc_feature (1070): n equals a,t,g, or c
  misc_feature (1071): n equals a,t,g, or c
  misc_feature (1072): n equals a,t,g, or c
  misc_feature (1073): n equals a,t,g, or c
  misc_feature (1074): n equals a,t,g, or c
  misc_feature (1075): n equals a,t,g, or c
  misc_feature (1076): n equals a,t,g, or c
  misc_feature (1077): n equals a,t,g, or c
  misc_feature (1078): n equals a,t,g, or c
  misc_feature (1079): n equals a,t,g, or c
  misc_feature (1080): n equals a,t,g, or c
  misc_feature (1081): n equals a,t,g, or c
  misc_feature (1082): n equals a,t,g, or c
  misc_feature (1083): n equals a,t,g, or c
  misc_feature (1084): n equals a,t,g, or c
  misc_feature (1085): n equals a,t,g, or c
  misc_feature (1086): n equals a,t,g, or c
  misc_feature (1087): n equals a,t,g, or c
  misc_feature (1088): n equals a,t,g, or c
  misc_feature (1089): n equals a,t,g, or c
  misc_feature (1090): n equals a,t,g, or c
  misc_feature (1091): n equals a,t,g, or c
  misc_feature (1092): n equals a,t,g, or c
  misc_feature (1093): n equals a,t,g, or c
  misc_feature (1094): n equals a,t,g, or c
  misc_feature (1095): n equals a,t,g, or c
  misc_feature (1096): n equals a,t,g, or c
  misc_feature (1097): n equals a,t,g, or c
  misc_feature (1098): n equals a,t,g, or c
  misc_feature (1099): n equals a,t,g, or c
  misc_feature (1100): n equals a,t,g, or c
  misc_feature (1101): n equals a,t,g, or c
  misc_feature (1102): n equals a,t,g, or c
  misc_feature (1103): n equals a,t,g, or c
  misc_feature (1104): n equals a,t,g, or c
  misc_feature (1105): n equals a,t,g, or c
  misc_feature (1106): n equals a,t,g, or c
  misc_feature (1107): n equals a,t,g, or c
  misc_feature (1108): n equals a,t,g, or c
  misc_feature (1109): n equals a,t,g, or c
  misc_feature (1110): n equals a,t,g, or c
  misc_feature (1111): n equals a,t,g, or c
  misc_feature (1112): n equals a,t,g, or c
  misc_feature (1113): n equals a,t,g, or c
  misc_feature (1114): n equals a,t,g, or c
  misc_feature (1115): n equals a,t,g, or c
  misc_feature (1116): n equals a,t,g, or c
  misc_feature (1117): n equals a,t,g, or c
  misc_feature (1118): n equals a,t,g, or c
  misc_feature (1119): n equals a,t,g, or c
  misc_feature (1120): n equals a,t,g, or c
  misc_feature (1121): n equals a,t,g, or c
  misc_feature (1122): n equals a,t,g, or c
  misc_feature (1123): n equals a,t,g, or c
  misc_feature (1124): n equals a,t,g, or c
  misc_feature (1125): n equals a,t,g, or c
  misc_feature (1126): n equals a,t,g, or c
  misc_feature (1127): n equals a,t,g, or c
  misc_feature (1128): n equals a,t,g, or c
  misc_feature (1129): n equals a,t,g, or c
  misc_feature (1130): n equals a,t,g, or c
  misc_feature (1131): n equals a,t,g, or c
  misc_feature (1132): n equals a,t,g, or c
  misc_feature (1133): n equals a,t,g, or c
  misc_feature (1134): n equals a,t,g, or c
  misc_feature (1135): n equals a,t,g, or c
  misc_feature (1136): n equals a,t,g, or c
  misc_feature (1137): n equals a,t,g, or c
  misc_feature (1138): n equals a,t,g, or c
  misc_feature (1139): n equals a,t,g, or c
  misc_feature (1140): n equals a,t,g, or c
  misc_feature (1141): n equals a,t,g, or c
  misc_feature (1142): n equals a,t,g, or c
  misc_feature (1143): n equals a,t,g, or c
  misc_feature (1144): n equals a,t,g, or c
  misc_feature (1145): n equals a,t,g, or c
  misc_feature (1146): n equals a,t,g, or c
  misc_feature (1147): n equals a,t,g, or c
  misc_feature (1148): n equals a,t,g, or c
  misc_feature (1149): n equals a,t,g, or c
  misc_feature (1150): n equals a,t,g, or c
  misc_feature (1151): n equals a,t,g, or c
  misc_feature (1152): n equals a,t,g, or c
  misc_feature (1153): n equals a,t,g, or c
  misc_feature (1154): n equals a,t,g, or c
  misc_feature (1155): n equals a,t,g, or c
  misc_feature (1156): n equals a,t,g, or c
  misc_feature (1157): n equals a,t,g, or c
  misc_feature (1158): n equals a,t,g, or c
  misc_feature (1159): n equals a,t,g, or c
  misc_feature (1160): n equals a,t,g, or c
  misc_feature (1161): n equals a,t,g, or c
  misc_feature (1162): n equals a,t,g, or c
  misc_feature (1163): n equals a,t,g, or c
  misc_feature (1164): n equals a,t,g, or c
  misc_feature (1165): n equals a,t,g, or c
  misc_feature (1166): n equals a,t,g, or c
  misc_feature (1167): n equals a,t,g, or c
  misc_feature (1168): n equals a,t,g, or c
  misc_feature (1169): n equals a,t,g, or c
  misc_feature (1170): n equals a,t,g, or c
  misc_feature (1171): n equals a,t,g, or c
  misc_feature (1172): n equals a,t,g, or c
  misc_feature (1173): n equals a,t,g, or c
  misc_feature (1174): n equals a,t,g, or c
  misc_feature (1175): n equals a,t,g, or c
  misc_feature (1176): n equals a,t,g, or c
  misc_feature (1177): n equals a,t,g, or c
  misc_feature (1178): n equals a,t,g, or c
  misc_feature (1179): n equals a,t,g, or c
  misc_feature (1180): n equals a,t,g, or c
  misc_feature (1181): n equals a,t,g, or c
  misc_feature (1182): n equals a,t,g, or c
  misc_feature (1183): n equals a,t,g, or c
  misc_feature (1184): n equals a,t,g, or c
  misc_feature (1185): n equals a,t,g, or c
  misc_feature (1186): n equals a,t,g, or c
  misc_feature (1187): n equals a,t,g, or c
  misc_feature (1188): n equals a,t,g, or c
  misc_feature (1189): n equals a,t,g, or c
  misc_feature (1190): n equals a,t,g, or c
  misc_feature (1191): n equals a,t,g, or c
  misc_feature (1192): n equals a,t,g, or c
  misc_feature (1193): n equals a,t,g, or c
  misc_feature (1194): n equals a,t,g, or c
  misc_feature (1195): n equals a,t,g, or c
  misc_feature (1196): n equals a,t,g, or c
  misc_feature (1197): n equals a,t,g, or c
  misc_feature (1198): n equals a,t,g, or c
  misc_feature (1199): n equals a,t,g, or c
  misc_feature (1200): n equals a,t,g, or c
  misc_feature (1201): n equals a,t,g, or c
  misc_feature (1202): n equals a,t,g, or c
  misc_feature (1203): n equals a,t,g, or c
  misc_feature (1204): n equals a,t,g, or c
  misc_feature (1205): n equals a,t,g, or c
  misc_feature (1206): n equals a,t,g, or c
  misc_feature (1207): n equals a,t,g, or c
  misc_feature (1208): n equals a,t,g, or c
  misc_feature (1209): n equals a,t,g, or c
  misc_feature (1210): n equals a,t,g, or c
  misc_feature (1211): n equals a,t,g, or c
  misc_feature (1212): n equals a,t,g, or c
  misc_feature (1213): n equals a,t,g, or c
  misc_feature (1214): n equals a,t,g, or c
  misc_feature (1215): n equals a,t,g, or c
  misc_feature (1216): n equals a,t,g, or c
  misc_feature (1217): n equals a,t,g, or c
  misc_feature (1218): n equals a,t,g, or c
  misc_feature (1219): n equals a,t,g, or c
  misc_feature (1220): n equals a,t,g, or c
  misc_feature (1221): n equals a,t,g, or c
  misc_feature (1222): n equals a,t,g, or c
  misc_feature (1223): n equals a,t,g, or c
  misc_feature (1224): n equals a,t,g, or c
  misc_feature (1225): n equals a,t,g, or c
  misc_feature (1226): n equals a,t,g, or c
  misc_feature (1227): n equals a,t,g, or c
  misc_feature (1228): n equals a,t,g, or c
  misc_feature (1229): n equals a,t,g, or c
  misc_feature (1230): n equals a,t,g, or c
  misc_feature (1231): n equals a,t,g, or c
  misc_feature (1232): n equals a,t,g, or c
  misc_feature (1233): n equals a,t,g, or c
  misc_feature (1234): n equals a,t,g, or c
  misc_feature (1235): n equals a,t,g, or c
  misc_feature (1236): n equals a,t,g, or c
  misc_feature (1237): n equals a,t,g, or c
  misc_feature (1238): n equals a,t,g, or c
  misc_feature (1239): n equals a,t,g, or c
  misc_feature (1240): n equals a,t,g, or c
  misc_feature (1241): n equals a,t,g, or c
ccttgttttttttttttttttttgagatagagtctcgctctgtcacccaggctggagtgctagtggcatgatctcgggctcactgcaatttccgtctcctggattcaagcaattctcctgcctcttccccagtagctggaattacaggcacatgccaccatgcccaactaatttttgtatttttagtagagacaggtttcaccatgttggccaggatggtgttgaacttctgtactcaggtnnnnnnnnnnnnnnnnnnnnnnnnnnnnnnnnnnnnnnnnnnnnnnnnnnnnnnnnnnnnnnnnnnnnnnnnnnnnnnnnnnnnnnnnnnnnnnnnnnnnnnnnnnnnnnnnnnnnnnnnnnnnnnnnnnnnnnnnnnnnnnnnnnnnnnnnnnnnnnnnnnnnnnnnnnnnnnnnnnnnnnnnnnnnnnnnnnnnnnnnnnnnnnnnnnnnnnnnnnnnnnnnnnnnnnnnnnnnnnnnnnnnnnnnnnnnnnnnnnnnnnnnnnnnnnnnnnnnnnnnnnnnnnnnnnnnnnnnnnnnnnnnnnnnnnnnnnnnnnnnnnnnnnnnnnnnnnnnnnnnnnnnnnnnnnnnnnnnnnnnnnnnnnnnnnnnnnnnnnnnnnnnnnnnnnnnnnnnnnnnnnnnnnnnnnnnnnnnnnnnnnnnnnnnnnnnnnnnnnnnnnnnnnnnnnnnnnnnnnnnnnnnnnnnnnnnnnnnnnnnnnnnnnnnnnnnnnnnnnnnnnnnnnnnnnnnnnnnnnnnnnnnnnnnnnnnnnnnnnnnnnnnnnnnnnnnnnnnnnnnnnnnnnnnnnnnnnnnnnnnnnnnnnnnnnnnnnnnnnnnnnnnnnnnnnnnnnnnnnnnnnnnnnnnnnnnnnnnnnnnnnnnnnnnnnnnnnnnnnnnnnnnnnnnnnnnnnnnnnnnnnnnnnnnnnnnnnnnnnnnnnnnnnnnnnnnnnnnnnnnnnnnnnnnnnnnnnnnnnnnnnnnnnnnnnnnnnnnnnnnnnnnnnnnnnnnnnnnnnnnnnnnnnnnnnnnnnnnnnnnnnnnnnnnnnnnnnnnnnnnnnnnnnnnnnnnnnnnnnnnnnnnnnnnnnnnnnnnnnnnnnnnnnnnnnnnnnnnnnnnnnnnnnnnnnnnnnnnnnnnnnnnnnnnnnnnnnnnnnnnnnnnnnnnnnnnnnnnnnnnnnnnnnnnnnnnnnnnnnnnnnnnnnnnnnnnnnnnnnnnnnnnnnnnnnnnnnnnnnnnccccttttttttttttttttttaaattggtgtgaacccagtatctacctcataagactgttgggaggcttaaataaatgtatagttattagagaaaaatgatattatcatatcaataaatgtagaagcatttgataaaattcaacatccattcatgattttaaaaaagaaaactctcggcaaactagaactagaaggaaactttcttaacttgataaaagacatctacaaaaaaccacccaaaactaggccaggcacagtggctcacacctgtaattccagcactttgggaggccgaggcgggcagatcacttgaggtcaggagttcaagaccagactggcaaacatggtgaaaccctgtctctactaaaaatacaaaaattagctgggtgtggtggtgtacactgtagtcccagatactcgggaggctgaggcaggaggattgcttgaacctgagaagtggaggttgtagtcagtcaaaattgtgccactgcactccagcctgggtaacagagcaagactctgtctcaagcaaaccaaaaaaataataataataacacccaaaactacagcgaatcttatccttcctggtgggagtgggaagtggaatgtttttctcctaagatcaggaacaaggaagggatgtctgcgtgctgtcaccatgcctattcagtgctgtactggaggccctagccaatgcaataaagcacggaaaagaaataaaaggcacacaaattagaaaggaaggaataaagtgctcagagtagtgcctggcatgtagcaaatctattagcaatcacatacatttctaggcattgaccctaagctcagagaggacagggaggggcatacctgcatagatcctgacaatttggaatgaatggcttccactgctccttgaattaaacctcagattcttttttttttttttttcgagatggagtctcactctgtcacccaggctggaatgcagtggcgcgatctcagctccctgca

SEQ ID NO: 674 - DNA, 5088 bp, Homo sapiens
  misc_feature (5): n equals a,t,g, or c
  misc_feature (6): n equals a,t,g, or c
  misc_feature (7): n equals a,t,g, or c
  misc_feature (8): n equals a,t,g, or c
  misc_feature (9): n equals a,t,g, or c
  misc_feature (10): n equals a,t,g, or c
  misc_feature (11): n equals a,t,g, or c
  misc_feature (12): n equals a,t,g, or c
  misc_feature (13): n equals a,t,g, or c
  misc_feature (14): n equals a,t,g, or c
  misc_feature (15): n equals a,t,g, or c
  misc_feature (16): n equals a,t,g, or c
  misc_feature (17): n equals a,t,g, or c
  misc_feature (18): n equals a,t,g, or c
  misc_feature (19): n equals a,t,g, or c
  misc_feature (20): n equals a,t,g, or c
  misc_feature (21): n equals a,t,g, or c
  misc_feature (22): n equals a,t,g, or c
  misc_feature (23): n equals a,t,g, or c
  misc_feature (24): n equals a,t,g, or c
  misc_feature (25): n equals a,t,g, or c
  misc_feature (26): n equals a,t,g, or c
  misc_feature (27): n equals a,t,g, or c
  misc_feature (28): n equals a,t,g, or c
  misc_feature (29): n equals a,t,g, or c
  misc_feature (30): n equals a,t,g, or c
  misc_feature (31): n equals a,t,g, or c
  misc_feature (32): n equals a,t,g, or c
  misc_feature (33): n equals a,t,g, or c
  misc_feature (34): n equals a,t,g, or c
  misc_feature (35): n equals a,t,g, or c
  misc_feature (36): n equals a,t,g, or c
  misc_feature (37): n equals a,t,g, or c
  misc_feature (38): n equals a,t,g, or c
  misc_feature (39): n equals a,t,g, or c
  misc_feature (40): n equals a,t,g, or c
  misc_feature (41): n equals a,t,g, or c
  misc_feature (42): n equals a,t,g, or c
  misc_feature (43): n equals a,t,g, or c
  misc_feature (44): n equals a,t,g, or c
  misc_feature (45): n equals a,t,g, or c
  misc_feature (46): n equals a,t,g, or c
  misc_feature (47): n equals a,t,g, or c
  misc_feature (48): n equals a,t,g, or c
  misc_feature (49): n equals a,t,g, or c
  misc_feature (50): n equals a,t,g, or c
  misc_feature (51): n equals a,t,g, or c
  misc_feature (52): n equals a,t,g, or c
  misc_feature (53): n equals a,t,g, or c
  misc_feature (54): n equals a,t,g, or c
  misc_feature (55): n equals a,t,g, or c
  misc_feature (56): n equals a,t,g, or c
  misc_feature (57): n equals a,t,g, or c
  misc_feature (58): n equals a,t,g, or c
  misc_feature (59): n equals a,t,g, or c
  misc_feature (60): n equals a,t,g, or c
  misc_feature (61): n equals a,t,g, or c
  misc_feature (62): n equals a,t,g, or c
  misc_feature (63): n equals a,t,g, or c
  misc_feature (64): n equals a,t,g, or c
  misc_feature (65): n equals a,t,g, or c
  misc_feature (66): n equals a,t,g, or c
  misc_feature (67): n equals a,t,g, or c
  misc_feature (68): n equals a,t,g, or c
  misc_feature (69): n equals a,t,g, or c
  misc_feature (70): n equals a,t,g, or c
  misc_feature (71): n equals a,t,g, or c
  misc_feature (72): n equals a,t,g, or c
  misc_feature (73): n equals a,t,g, or c
  misc_feature (74): n equals a,t,g, or c
  misc_feature (75): n equals a,t,g, or c
  misc_feature (76): n equals a,t,g, or c
  misc_feature (77): n equals a,t,g, or c
  misc_feature (78): n equals a,t,g, or c
  misc_feature (79): n equals a,t,g, or c
  misc_feature (80): n equals a,t,g, or c
  misc_feature (81): n equals a,t,g, or c
  misc_feature (82): n equals a,t,g, or c
  misc_feature (83): n equals a,t,g, or c
  misc_feature (84): n equals a,t,g, or c
  misc_feature (85): n equals a,t,g, or c
  misc_feature (86): n equals a,t,g, or c
  misc_feature (87): n equals a,t,g, or c
  misc_feature (88): n equals a,t,g, or c
  misc_feature (89): n equals a,t,g, or c
  misc_feature (90): n equals a,t,g, or c
  misc_feature (91): n equals a,t,g, or c
  misc_feature (92): n equals a,t,g, or c
  misc_feature (93): n equals a,t,g, or c
  misc_feature (94): n equals a,t,g, or c
  misc_feature (95): n equals a,t,g, or c
  misc_feature (96): n equals a,t,g, or c
  misc_feature (97): n equals a,t,g, or c
  misc_feature (98): n equals a,t,g, or c
  misc_feature (99): n equals a,t,g, or c
  misc_feature (100): n equals a,t,g, or c
  misc_feature (101): n equals a,t,g, or c
  misc_feature (102): n equals a,t,g, or c
  misc_feature (103): n equals a,t,g, or c
  misc_feature (104): n equals a,t,g, or c
  misc_feature (105): n equals a,t,g, or c
  misc_feature (106): n equals a,t,g, or c
  misc_feature (107): n equals a,t,g, or c
  misc_feature (108): n equals a,t,g, or c
  misc_feature (109): n equals a,t,g, or c
  misc_feature (110): n equals a,t,g, or c
  misc_feature (111): n equals a,t,g, or c
  misc_feature (112): n equals a,t,g, or c
  misc_feature (113): n equals a,t,g, or c
  misc_feature (114): n equals a,t,g, or c
  misc_feature (115): n equals a,t,g, or c
  misc_feature (116): n equals a,t,g, or c
  misc_feature (117): n equals a,t,g, or c
  misc_feature (118): n equals a,t,g, or c
  misc_feature (119): n equals a,t,g, or c
  misc_feature (120): n equals a,t,g, or c
  misc_feature (121): n equals a,t,g, or c
  misc_feature (122): n equals a,t,g, or c
  misc_feature (123): n equals a,t,g, or c
  misc_feature (124): n equals a,t,g, or c
  misc_feature (125): n equals a,t,g, or c
  misc_feature (126): n equals a,t,g, or c
  misc_feature (127): n equals a,t,g, or c
  misc_feature (128): n equals a,t,g, or c
  misc_feature (129): n equals a,t,g, or c
  misc_feature (130): n equals a,t,g, or c
  misc_feature (131): n equals a,t,g, or c
  misc_feature (132): n equals a,t,g, or c
  misc_feature (133): n equals a,t,g, or c
  misc_feature (134): n equals a,t,g, or c
  misc_feature (135): n equals a,t,g, or c
  misc_feature (136): n equals a,t,g, or c
  misc_feature (137): n equals a,t,g, or c
  misc_feature (138): n equals a,t,g, or c
  misc_feature (139): n equals a,t,g, or c
  misc_feature (140): n equals a,t,g, or c
  misc_feature (141): n equals a,t,g, or c
  misc_feature (142): n equals a,t,g, or c
  misc_feature (143): n equals a,t,g, or c
  misc_feature (144): n equals a,t,g, or c
  misc_feature (145): n equals a,t,g, or c
  misc_feature (146): n equals a,t,g, or c
  misc_feature (147): n equals a,t,g, or c
  misc_feature (148): n equals a,t,g, or c
  misc_feature (149): n equals a,t,g, or c
  misc_feature (150): n equals a,t,g, or c
  misc_feature (151): n equals a,t,g, or c
  misc_feature (152): n equals a,t,g, or c
  misc_feature (153): n equals a,t,g, or c
  misc_feature (154): n equals a,t,g, or c
  misc_feature (155): n equals a,t,g, or c
  misc_feature (156): n equals a,t,g, or c
  misc_feature (157): n equals a,t,g, or c
  misc_feature (158): n equals a,t,g, or c
  misc_feature (159): n equals a,t,g, or c
  misc_feature (160): n equals a,t,g, or c
  misc_feature (161): n equals a,t,g, or c
  misc_feature (162): n equals a,t,g, or c
  misc_feature (163): n equals a,t,g, or c
  misc_feature (164): n equals a,t,g, or c
  misc_feature (165): n equals a,t,g, or c
  misc_feature (166): n equals a,t,g, or c
  misc_feature (167): n equals a,t,g, or c
  misc_feature (168): n equals a,t,g, or c
  misc_feature (169): n equals a,t,g, or c
  misc_feature (170): n equals a,t,g, or c
  misc_feature (171): n equals a,t,g, or c
  misc_feature (172): n equals a,t,g, or c
  misc_feature (173): n equals a,t,g, or c
  misc_feature (174): n equals a,t,g, or c
  misc_feature (175): n equals a,t,g, or c
  misc_feature (176): n equals a,t,g, or c
  misc_feature (177): n equals a,t,g, or c
  misc_feature (178): n equals a,t,g, or c
  misc_feature (179): n equals a,t,g, or c
  misc_feature (180): n equals a,t,g, or c
  misc_feature (181): n equals a,t,g, or c
  misc_feature (182): n equals a,t,g, or c
  misc_feature (183): n equals a,t,g, or c
  misc_feature (184): n equals a,t,g, or c
  misc_feature (185): n equals a,t,g, or c
  misc_feature (186): n equals a,t,g, or c
  misc_feature (187): n equals a,t,g, or c
  misc_feature (188): n equals a,t,g, or c
  misc_feature (189): n equals a,t,g, or c
  misc_feature (190): n equals a,t,g, or c
  misc_feature (191): n equals a,t,g, or c
  misc_feature (192): n equals a,t,g, or c
  misc_feature (193): n equals a,t,g, or c
  misc_feature (194): n equals a,t,g, or c
  misc_feature (195): n equals a,t,g, or c
  misc_feature (196): n equals a,t,g, or c
  misc_feature (197): n equals a,t,g, or c
  misc_feature (198): n equals a,t,g, or c
  misc_feature (199): n equals a,t,g, or c
  misc_feature (200): n equals a,t,g, or c
  misc_feature (201): n equals a,t,g, or c
  misc_feature (202): n equals a,t,g, or c
  misc_feature (203): n equals a,t,g, or c
  misc_feature (204): n equals a,t,g, or c
  misc_feature (205): n equals a,t,g, or c
  misc_feature (206): n equals a,t,g, or c
  misc_feature (207): n equals a,t,g, or c
  misc_feature (208): n equals a,t,g, or c
  misc_feature (209): n equals a,t,g, or c
  misc_feature (210): n equals a,t,g, or c
  misc_feature (211): n equals a,t,g, or c
  misc_feature (212): n equals a,t,g, or c
  misc_feature (213): n equals a,t,g, or c
  misc_feature (214): n equals a,t,g, or c
  misc_feature (215): n equals a,t,g, or c
  misc_feature (216): n equals a,t,g, or c
  misc_feature (217): n equals a,t,g, or c
  misc_feature (218): n equals a,t,g, or c
  misc_feature (219): n equals a,t,g, or c
  misc_feature (220): n equals a,t,g, or c
  misc_feature (221): n equals a,t,g, or c
  misc_feature (222): n equals a,t,g, or c
  misc_feature (223): n equals a,t,g, or c
  misc_feature (224): n equals a,t,g, or c
  misc_feature (225): n equals a,t,g, or c
  misc_feature (226): n equals a,t,g, or c
  misc_feature (227): n equals a,t,g, or c
  misc_feature (228): n equals a,t,g, or c
  misc_feature (229): n equals a,t,g, or c
  misc_feature (230): n equals a,t,g, or c
  misc_feature (231): n equals a,t,g, or c
  misc_feature (232): n equals a,t,g, or c
  misc_feature (233): n equals a,t,g, or c
  misc_feature (234): n equals a,t,g, or c
  misc_feature (235): n equals a,t,g, or c
  misc_feature (236): n equals a,t,g, or c
  misc_feature (237): n equals a,t,g, or c
  misc_feature (238): n equals a,t,g, or c
  misc_feature (239): n equals a,t,g, or c
  misc_feature (240): n equals a,t,g, or c
  misc_feature (241): n equals a,t,g, or c
  misc_feature (242): n equals a,t,g, or c
  misc_feature (243): n equals a,t,g, or c
  misc_feature (244): n equals a,t,g, or c
  misc_feature (245): n equals a,t,g, or c
  misc_feature (246): n equals a,t,g, or c
  misc_feature (247): n equals a,t,g, or c
  misc_feature (248): n equals a,t,g, or c
  misc_feature (249): n equals a,t,g, or c
  misc_feature (250): n equals a,t,g, or c
  misc_feature (251): n equals a,t,g, or c
  misc_feature (252): n equals a,t,g, or c
  misc_feature (253): n equals a,t,g, or c
  misc_feature (254): n equals a,t,g, or c
  misc_feature (255): n equals a,t,g, or c
  misc_feature (256): n equals a,t,g, or c
  misc_feature (257): n equals a,t,g, or c
  misc_feature (258): n equals a,t,g, or c
  misc_feature (259): n equals a,t,g, or c
  misc_feature (260): n equals a,t,g, or c
  misc_feature (261): n equals a,t,g, or c
  misc_feature (262): n equals a,t,g, or c
  misc_feature (263): n equals a,t,g, or c
  misc_feature (264): n equals a,t,g, or c
  misc_feature (265): n equals a,t,g, or c
  misc_feature (266): n equals a,t,g, or c
  misc_feature (267): n equals a,t,g, or c
  misc_feature (268): n equals a,t,g, or c
  misc_feature (269): n equals a,t,g, or c
  misc_feature (270): n equals a,t,g, or c
  misc_feature (271): n equals a,t,g, or c
  misc_feature (272): n equals a,t,g, or c
  misc_feature (273): n equals a,t,g, or c
  misc_feature (274): n equals a,t,g, or c
  misc_feature (275): n equals a,t,g, or c
  misc_feature (276): n equals a,t,g, or c
  misc_feature (277): n equals a,t,g, or c
  misc_feature (278): n equals a,t,g, or c
  misc_feature (279): n equals a,t,g, or c
  misc_feature (280): n equals a,t,g, or c
  misc_feature (281): n equals a,t,g, or c
  misc_feature (282): n equals a,t,g, or c
  misc_feature (283): n equals a,t,g, or c
  misc_feature (284): n equals a,t,g, or c
  misc_feature (285): n equals a,t,g, or c
  misc_feature (286): n equals a,t,g, or c
  misc_feature (287): n equals a,t,g, or c
  misc_feature (288): n equals a,t,g, or c
  misc_feature (289): n equals a,t,g, or c
  misc_feature (290): n equals a,t,g, or c
  misc_feature (291): n equals a,t,g, or c
  misc_feature (292): n equals a,t,g, or c
  misc_feature (293): n equals a,t,g, or c
  misc_feature (294): n equals a,t,g, or c
  misc_feature (295): n equals a,t,g, or c
  misc_feature (296): n equals a,t,g, or c
  misc_feature (297): n equals a,t,g, or c
  misc_feature (298): n equals a,t,g, or c
  misc_feature (299): n equals a,t,g, or c
  misc_feature (300): n equals a,t,g, or c
  misc_feature (301): n equals a,t,g, or c
  misc_feature (302): n equals a,t,g, or c
  misc_feature (303): n equals a,t,g, or c
  misc_feature (304): n equals a,t,g, or c
  misc_feature (3943): n equals a,t,g, or c
  misc_feature (3944): n equals a,t,g, or c
  misc_feature (3945): n equals a,t,g, or c
  misc_feature (3946): n equals a,t,g, or c
  misc_feature (3947): n equals a,t,g, or c
  misc_feature (3948): n equals a,t,g, or c
  misc_feature (3949): n equals a,t,g, or c
  misc_feature (3950): n equals a,t,g, or c
  misc_feature (3951): n equals a,t,g, or c
  misc_feature (3952): n equals a,t,g, or c
  misc_feature (3953): n equals a,t,g, or c
  misc_feature (3954): n equals a,t,g, or c
  misc_feature (3955): n equals a,t,g, or c
  misc_feature (3956): n equals a,t,g, or c
  misc_feature (3957): n equals a,t,g, or c
  misc_feature (3958): n equals a,t,g, or c
  misc_feature (3959): n equals a,t,g, or c
  misc_feature (3960): n equals a,t,g, or c
  misc_feature (3961): n equals a,t,g, or c
  misc_feature (3962): n equals a,t,g, or c
  misc_feature (3963): n equals a,t,g, or c
  misc_feature (3964): n equals a,t,g, or c
  misc_feature (3965): n equals a,t,g, or c
  misc_feature (3966): n equals a,t,g, or c
  misc_feature (3967): n equals a,t,g, or c
  misc_feature (3968): n equals a,t,g, or c
  misc_feature (3969): n equals a,t,g, or c
  misc_feature (3970): n equals a,t,g, or c
  misc_feature (3971): n equals a,t,g, or c
  misc_feature (3972): n equals a,t,g, or c
  misc_feature (3973): n equals a,t,g, or c
  misc_feature (3974): n equals a,t,g, or c
  misc_feature (3975): n equals a,t,g, or c
  misc_feature (3976): n equals a,t,g, or c
  misc_feature (3977): n equals a,t,g, or c
  misc_feature (3978): n equals a,t,g, or c
  misc_feature (3979): n equals a,t,g, or c
  misc_feature (3980): n equals a,t,g, or c
  misc_feature (3981): n equals a,t,g, or c
  misc_feature (3982): n equals a,t,g, or c
  misc_feature (3983): n equals a,t,g, or c
  misc_feature (3984): n equals a,t,g, or c
  misc_feature (3985): n equals a,t,g, or c
  misc_feature (3986): n equals a,t,g, or c
  misc_feature (3987): n equals a,t,g, or c
  misc_feature (3988): n equals a,t,g, or c
  misc_feature (3989): n equals a,t,g, or c
  misc_feature (3990): n equals a,t,g, or c
  misc_feature (3991): n equals a,t,g, or c
  misc_feature (3992): n equals a,t,g, or c
  misc_feature (3993): n equals a,t,g, or c
  misc_feature (3994): n equals a,t,g, or c
  misc_feature (3995): n equals a,t,g, or c
  misc_feature (3996): n equals a,t,g, or c
  misc_feature (3997): n equals a,t,g, or c
  misc_feature (3998): n equals a,t,g, or c
  misc_feature (3999): n equals a,t,g, or c
  misc_feature (4000): n equals a,t,g, or c
  misc_feature (4001): n equals a,t,g, or c
  misc_feature (4002): n equals a,t,g, or c
  misc_feature (4003): n equals a,t,g, or c
  misc_feature (4004): n equals a,t,g, or c
  misc_feature (4005): n equals a,t,g, or c
  misc_feature (4006): n equals a,t,g, or c
  misc_feature (4007): n equals a,t,g, or c
  misc_feature (4008): n equals a,t,g, or c
  misc_feature (4009): n equals a,t,g, or c
  misc_feature (4010): n equals a,t,g, or c
  misc_feature (4011): n equals a,t,g, or c
  misc_feature (4012): n equals a,t,g, or c
  misc_feature (4013): n equals a,t,g, or c
  misc_feature (4014): n equals a,t,g, or c
  misc_feature (4015): n equals a,t,g, or c
  misc_feature (4016): n equals a,t,g, or c
  misc_feature (4017): n equals a,t,g, or c
  misc_feature (4018): n equals a,t,g, or c
  misc_feature (4019): n equals a,t,g, or c
  misc_feature (4020): n equals a,t,g, or c
  misc_feature (4021): n equals a,t,g, or c
  misc_feature (4022): n equals a,t,g, or c
  misc_feature (4023): n equals a,t,g, or c
  misc_feature (4024): n equals a,t,g, or c
  misc_feature (4025): n equals a,t,g, or c
  misc_feature (4026): n equals a,t,g, or c
  misc_feature (4027): n equals a,t,g, or c
  misc_feature (4028): n equals a,t,g, or c
  misc_feature (4029): n equals a,t,g, or c
  misc_feature (4030): n equals a,t,g, or c
  misc_feature (4031): n equals a,t,g, or c
  misc_feature (4032): n equals a,t,g, or c
  misc_feature (4033): n equals a,t,g, or c
  misc_feature (4034): n equals a,t,g, or c
  misc_feature (4035): n equals a,t,g, or c
  misc_feature (4036): n equals a,t,g, or c
  misc_feature (4037): n equals a,t,g, or c
  misc_feature (4038): n equals a,t,g, or c
  misc_feature (4039): n equals a,t,g, or c
  misc_feature (4040): n equals a,t,g, or c
  misc_feature (4041): n equals a,t,g, or c
  misc_feature (4042): n equals a,t,g, or c
  misc_feature (4043): n equals a,t,g, or c
  misc_feature (4044): n equals a,t,g, or c
  misc_feature (4045): n equals a,t,g, or c
  misc_feature (4046): n equals a,t,g, or c
  misc_feature (4047): n equals a,t,g, or c
  misc_feature (4048): n equals a,t,g, or c
  misc_feature (4049): n equals a,t,g, or c
  misc_feature (4050): n equals a,t,g, or c
  misc_feature (4051): n equals a,t,g, or c
  misc_feature (4052): n equals a,t,g, or c
  misc_feature (4053): n equals a,t,g, or c
  misc_feature (4054): n equals a,t,g, or c
  misc_feature (4055): n equals a,t,g, or c
  misc_feature (4056): n equals a,t,g, or c
  misc_feature (4057): n equals a,t,g, or c
  misc_feature (4058): n equals a,t,g, or c
  misc_feature (4059): n equals a,t,g, or c
  misc_feature (4060): n equals a,t,g, or c
  misc_feature (4061): n equals a,t,g, or c
  misc_feature (4062): n equals a,t,g, or c
  misc_feature (4063): n equals a,t,g, or c
  misc_feature (4064): n equals a,t,g, or c
  misc_feature (4065): n equals a,t,g, or c
  misc_feature (4066): n equals a,t,g, or c
  misc_feature (4067): n equals a,t,g, or c
  misc_feature (4068): n equals a,t,g, or c
  misc_feature (4069): n equals a,t,g, or c
  misc_feature (4070): n equals a,t,g, or c
  misc_feature (4071): n equals a,t,g, or c
  misc_feature (4072): n equals a,t,g, or c
  misc_feature (4073): n equals a,t,g, or c
  misc_feature (4074): n equals a,t,g, or c
  misc_feature (4075): n equals a,t,g, or c
  misc_feature (4076): n equals a,t,g, or c
  misc_feature (4077): n equals a,t,g, or c
  misc_feature (4078): n equals a,t,g, or c
  misc_feature (4079): n equals a,t,g, or c
  misc_feature (4080): n equals a,t,g, or c
  misc_feature (4081): n equals a,t,g, or c
  misc_feature (4082): n equals a,t,g, or c
  misc_feature (4083): n equals a,t,g, or c
  misc_feature (4084): n equals a,t,g, or c
  misc_feature (4085): n equals a,t,g, or c
  misc_feature (4086): n equals a,t,g, or c
  misc_feature (4087): n equals a,t,g, or c
  misc_feature (4088): n equals a,t,g, or c
  misc_feature (4089): n equals a,t,g, or c
  misc_feature (4090): n equals a,t,g, or c
  misc_feature (4091): n equals a,t,g, or c
  misc_feature (4092): n equals a,t,g, or c
  misc_feature (4093): n equals a,t,g, or c
  misc_feature (4094): n equals a,t,g, or c
  misc_feature (4095): n equals a,t,g, or c
  misc_feature (4096): n equals a,t,g, or c
  misc_feature (4097): n equals a,t,g, or c
  misc_feature (4098): n equals a,t,g, or c
  misc_feature (4099): n equals a,t,g, or c
  misc_feature (4100): n equals a,t,g, or c
  misc_feature (4101): n equals a,t,g, or c
  misc_feature (4102): n equals a,t,g, or c
  misc_feature (4103): n equals a,t,g, or c
  misc_feature (4104): n equals a,t,g, or c
  misc_feature (4105): n equals a,t,g, or c
  misc_feature (4106): n equals a,t,g, or c
  misc_feature (4107): n equals a,t,g, or c
  misc_feature (4108): n equals a,t,g, or c
  misc_feature (4109): n equals a,t,g, or c
  misc_feature (4110): n equals a,t,g, or c
  misc_feature (4111): n equals a,t,g, or c
  misc_feature (4112): n equals a,t,g, or c
  misc_feature (4113): n equals a,t,g, or c
  misc_feature (4114): n equals a,t,g, or c
  misc_feature (4115): n equals a,t,g, or c
  misc_feature (4116): n equals a,t,g, or c
  misc_feature (4117): n equals a,t,g, or c
  misc_feature (4118): n equals a,t,g, or c
  misc_feature (4119): n equals a,t,g, or c
  misc_feature (4120): n equals a,t,g, or c
  misc_feature (4121): n equals a,t,g, or c
  misc_feature (4122): n equals a,t,g, or c
  misc_feature (4123): n equals a,t,g, or c
  misc_feature (4124): n equals a,t,g, or c
  misc_feature (4125): n equals a,t,g, or c
  misc_feature (4126): n equals a,t,g, or c
  misc_feature (4127): n equals a,t,g, or c
  misc_feature (4128): n equals a,t,g, or c
  misc_feature (4129): n equals a,t,g, or c
  misc_feature (4130): n equals a,t,g, or c
  misc_feature (4131): n equals a,t,g, or c
  misc_feature (4132): n equals a,t,g, or c
  misc_feature (4133): n equals a,t,g, or c
  misc_feature (4134): n equals a,t,g, or c
  misc_feature (4135): n equals a,t,g, or c
  misc_feature (4136): n equals a,t,g, or c
  misc_feature (4137): n equals a,t,g, or c
  misc_feature (4138): n equals a,t,g, or c
  misc_feature (4139): n equals a,t,g, or c
  misc_feature (4140): n equals a,t,g, or c
  misc_feature (4141): n equals a,t,g, or c
  misc_feature (4142): n equals a,t,g, or c
  misc_feature (4143): n equals a,t,g, or c
  misc_feature (4144): n equals a,t,g, or c
  misc_feature (4145): n equals a,t,g, or c
  misc_feature (4146): n equals a,t,g, or c
  misc_feature (4147): n equals a,t,g, or c
  misc_feature (4148): n equals a,t,g, or c
  misc_feature (4149): n equals a,t,g, or c
  misc_feature (4150): n equals a,t,g, or c
  misc_feature (4151): n equals a,t,g, or c
  misc_feature (4152): n equals a,t,g, or c
  misc_feature (4153): n equals a,t,g, or c
  misc_feature (4154): n equals a,t,g, or c
  misc_feature (4155): n equals a,t,g, or c
  misc_feature (4156): n equals a,t,g, or c
  misc_feature (4157): n equals a,t,g, or c
  misc_feature (4158): n equals a,t,g, or c
  misc_feature (4159): n equals a,t,g, or c
  misc_feature (4160): n equals a,t,g, or c
  misc_feature (4161): n equals a,t,g, or c
  misc_feature (4162): n equals a,t,g, or c
  misc_feature (4163): n equals a,t,g, or c
  misc_feature (4164): n equals a,t,g, or c
  misc_feature (4165): n equals a,t,g, or c
  misc_feature (4166): n equals a,t,g, or c
  misc_feature (4167): n equals a,t,g, or c
  misc_feature (4168): n equals a,t,g, or c
  misc_feature (4169): n equals a,t,g, or c
  misc_feature (4170): n equals a,t,g, or c
  misc_feature (4171): n equals a,t,g, or c
  misc_feature (4172): n equals a,t,g, or c
  misc_feature (4173): n equals a,t,g, or c
  misc_feature (4174): n equals a,t,g, or c
  misc_feature (4175): n equals a,t,g, or c
  misc_feature (4176): n equals a,t,g, or c
  misc_feature (4177): n equals a,t,g, or c
  misc_feature (4178): n equals a,t,g, or c
  misc_feature (4179): n equals a,t,g, or c
  misc_feature (4180): n equals a,t,g, or c
  misc_feature (4181): n equals a,t,g, or c
  misc_feature (4182): n equals a,t,g, or c
  misc_feature (4183): n equals a,t,g, or c
  misc_feature (4184): n equals a,t,g, or c
  misc_feature (4185): n equals a,t,g, or c
  misc_feature (4186): n equals a,t,g, or c
  misc_feature (4187): n equals a,t,g, or c
  misc_feature (4188): n equals a,t,g, or c
  misc_feature (4189): n equals a,t,g, or c
  misc_feature (4190): n equals a,t,g, or c
  misc_feature (4191): n equals a,t,g, or c
  misc_feature (4192): n equals a,t,g, or c
  misc_feature (4193): n equals a,t,g, or c
  misc_feature (4194): n equals a,t,g, or c
  misc_feature (4195): n equals a,t,g, or c
  misc_feature (4196): n equals a,t,g, or c
  misc_feature (4197): n equals a,t,g, or c
  misc_feature (4198): n equals a,t,g, or c
  misc_feature (4199): n equals a,t,g, or c
  misc_feature (4200): n equals a,t,g, or c
  misc_feature (4201): n equals a,t,g, or c
  misc_feature (4202): n equals a,t,g, or c
  misc_feature (4203): n equals a,t,g, or c
  misc_feature (4204): n equals a,t,g, or c
  misc_feature (4205): n equals a,t,g, or c
  misc_feature (4206): n equals a,t,g, or c
  misc_feature (4207): n equals a,t,g, or c
  misc_feature (4208): n equals a,t,g, or c
  misc_feature (4209): n equals a,t,g, or c
  misc_feature (4210): n equals a,t,g, or c
  misc_feature (4211): n equals a,t,g, or c
  misc_feature (4212): n equals a,t,g, or c
  misc_feature (4213): n equals a,t,g, or c
  misc_feature (4214): n equals a,t,g, or c
  misc_feature (4215): n equals a,t,g, or c
  misc_feature (4216): n equals a,t,g, or c
  misc_feature (4217): n equals a,t,g, or c
  misc_feature (4218): n equals a,t,g, or c
  misc_feature (4219): n equals a,t,g, or c
  misc_feature (4220): n equals a,t,g, or c
  misc_feature (4221): n equals a,t,g, or c
  misc_feature (4222): n equals a,t,g, or c
  misc_feature (4223): n equals a,t,g, or c
  misc_feature (4224): n equals a,t,g, or c
  misc_feature (4225): n equals a,t,g, or c
  misc_feature (4226): n equals a,t,g, or c
  misc_feature (4227): n equals a,t,g, or c
  misc_feature (4228): n equals a,t,g, or c
  misc_feature (4229): n equals a,t,g, or c
  misc_feature (4230): n equals a,t,g, or c
  misc_feature (4231): n equals a,t,g, or c
  misc_feature (4232): n equals a,t,g, or c
  misc_feature (4233): n equals a,t,g, or c
  misc_feature (4234): n equals a,t,g, or c
  misc_feature (4235): n equals a,t,g, or c
  misc_feature (4236): n equals a,t,g, or c
  misc_feature (4237): n equals a,t,g, or c
  misc_feature (4238): n equals a,t,g, or c
  misc_feature (4239): n equals a,t,g, or c
  misc_feature (4240): n equals a,t,g, or c
  misc_feature (4241): n equals a,t,g, or c
  misc_feature (4242): n equals a,t,g, or c
  misc_feature (4243): n equals a,t,g, or c
  misc_feature (4244): n equals a,t,g, or c
  misc_feature (4245): n equals a,t,g, or c
  misc_feature (4246): n equals a,t,g, or c
  misc_feature (4247): n equals a,t,g, or c
  misc_feature (4248): n equals a,t,g, or c
  misc_feature (4249): n equals a,t,g, or c
  misc_feature (4250): n equals a,t,g, or c
  misc_feature (4251): n equals a,t,g, or c
  misc_feature (4252): n equals a,t,g, or c
  misc_feature (4253): n equals a,t,g, or c
  misc_feature (4254): n equals a,t,g, or c
  misc_feature (4255): n equals a,t,g, or c
  misc_feature (4256): n equals a,t,g, or c
  misc_feature (4257): n equals a,t,g, or c
  misc_feature (4258): n equals a,t,g, or c
  misc_feature (4259): n equals a,t,g, or c
  misc_feature (4260): n equals a,t,g, or c
  misc_feature (4261): n equals a,t,g, or c
  misc_feature (4262): n equals a,t,g, or c
  misc_feature (4263): n equals a,t,g, or c
  misc_feature (4264): n equals a,t,g, or c
  misc_feature (4265): n equals a,t,g, or c
  misc_feature (4266): n equals a,t,g, or c
  misc_feature (4267): n equals a,t,g, or c
  misc_feature (4268): n equals a,t,g, or c
  misc_feature (4269): n equals a,t,g, or c
  misc_feature (4270): n equals a,t,g, or c
  misc_feature (4271): n equals a,t,g, or c
  misc_feature (4272): n equals a,t,g, or c
  misc_feature (4273): n equals a,t,g, or c
  misc_feature (4274): n equals a,t,g, or c
  misc_feature (4275): n equals a,t,g, or c
  misc_feature (4276): n equals a,t,g, or c
  misc_feature (4277): n equals a,t,g, or c
  misc_feature (4278): n equals a,t,g, or c
  misc_feature (4279): n equals a,t,g, or c
  misc_feature (4280): n equals a,t,g, or c
  misc_feature (4281): n equals a,t,g, or c
  misc_feature (4282): n equals a,t,g, or c
  misc_feature (4283): n equals a,t,g, or c
  misc_feature (4284): n equals a,t,g, or c
  misc_feature (4285): n equals a,t,g, or c
  misc_feature (4286): n equals a,t,g, or c
  misc_feature (4287): n equals a,t,g, or c
  misc_feature (4288): n equals a,t,g, or c
  misc_feature (4289): n equals a,t,g, or c
  misc_feature (4290): n equals a,t,g, or c
  misc_feature (4291): n equals a,t,g, or c
  misc_feature (4292): n equals a,t,g, or c
  misc_feature (4293): n equals a,t,g, or c
  misc_feature (4294): n equals a,t,g, or c
  misc_feature (4295): n equals a,t,g, or c
  misc_feature (4296): n equals a,t,g, or c
  misc_feature (4297): n equals a,t,g, or c
  misc_feature (4298): n equals a,t,g, or c
  misc_feature (4299): n equals a,t,g, or c
  misc_feature (4300): n equals a,t,g, or c
  misc_feature (4301): n equals a,t,g, or c
  misc_feature (4302): n equals a,t,g, or c
  misc_feature (4303): n equals a,t,g, or c
  misc_feature (4304): n equals a,t,g, or c
  misc_feature (4305): n equals a,t,g, or c
  misc_feature (4306): n equals a,t,g, or c
  misc_feature (4307): n equals a,t,g, or c
  misc_feature (4308): n equals a,t,g, or c
  misc_feature (4309): n equals a,t,g, or c
  misc_feature (4310): n equals a,t,g, or c
  misc_feature (4311): n equals a,t,g, or c
  misc_feature (4312): n equals a,t,g, or c
  misc_feature (4313): n equals a,t,g, or c
  misc_feature (4314): n equals a,t,g, or c
  misc_feature (4315): n equals a,t,g, or c
  misc_feature (4316): n equals a,t,g, or c
  misc_feature (4317): n equals a,t,g, or c
  misc_feature (4318): n equals a,t,g, or c
  misc_feature (4319): n equals a,t,g, or c
  misc_feature (4320): n equals a,t,g, or c
  misc_feature (4321): n equals a,t,g, or c
  misc_feature (4322): n equals a,t,g, or c
  misc_feature (4323): n equals a,t,g, or c
  misc_feature (4324): n equals a,t,g, or c
  misc_feature (4325): n equals a,t,g, or c
  misc_feature (4326): n equals a,t,g, or c
  misc_feature (4327): n equals a,t,g, or c
  misc_feature (4328): n equals a,t,g, or c
  misc_feature (4329): n equals a,t,g, or c
  misc_feature (4330): n equals a,t,g, or c
  misc_feature (4331): n equals a,t,g, or c
  misc_feature (4332): n equals a,t,g, or c
  misc_feature (4333): n equals a,t,g, or c
  misc_feature (4334): n equals a,t,g, or c
  misc_feature (4335): n equals a,t,g, or c
  misc_feature (4336): n equals a,t,g, or c
  misc_feature (4337): n equals a,t,g, or c
  misc_feature (4338): n equals a,t,g, or c
  misc_feature (4339): n equals a,t,g, or c
  misc_feature (4340): n equals a,t,g, or c
  misc_feature (4341): n equals a,t,g, or c
  misc_feature (4342): n equals a,t,g, or c
  misc_feature (4343): n equals a,t,g, or c
  misc_feature (4344): n equals a,t,g, or c
  misc_feature (4345): n equals a,t,g, or c
  misc_feature (4346): n equals a,t,g, or c
  misc_feature (4347): n equals a,t,g, or c
  misc_feature (4348): n equals a,t,g, or c
  misc_feature (4349): n equals a,t,g, or c
  misc_feature (4350): n equals a,t,g, or c
  misc_feature (4351): n equals a,t,g, or c
  misc_feature (4352): n equals a,t,g, or c
  misc_feature (4353): n equals a,t,g, or c
  misc_feature (4354): n equals a,t,g, or c
  misc_feature (4355): n equals a,t,g, or c
  misc_feature (4356): n equals a,t,g, or c
  misc_feature (4357): n equals a,t,g, or c
  misc_feature (4358): n equals a,t,g, or c
  misc_feature (4359): n equals a,t,g, or c
  misc_feature (4360): n equals a,t,g, or c
  misc_feature (4361): n equals a,t,g, or c
  misc_feature (4362): n equals a,t,g, or c
  misc_feature (4363): n equals a,t,g, or c
  misc_feature (4364): n equals a,t,g, or c
  misc_feature (4365): n equals a,t,g, or c
  misc_feature (4366): n equals a,t,g, or c
  misc_feature (4367): n equals a,t,g, or c
  misc_feature (4368): n equals a,t,g, or c
  misc_feature (4369): n equals a,t,g, or c
  misc_feature (4370): n equals a,t,g, or c
  misc_feature (4371): n equals a,t,g, or c
  misc_feature (4372): n equals a,t,g, or c
  misc_feature (4373): n equals a,t,g, or c
  misc_feature (4374): n equals a,t,g, or c
  misc_feature (4375): n equals a,t,g, or c
  misc_feature (4376): n equals a,t,g, or c
  misc_feature (4377): n equals a,t,g, or c
  misc_feature (4378): n equals a,t,g, or c
  misc_feature (4379): n equals a,t,g, or c
  misc_feature (4380): n equals a,t,g, or c
  misc_feature (4381): n equals a,t,g, or c
  misc_feature (4382): n equals a,t,g, or c
  misc_feature (4383): n equals a,t,g, or c
  misc_feature (4384): n equals a,t,g, or c
  misc_feature (4385): n equals a,t,g, or c
  misc_feature (4386): n equals a,t,g, or c
  misc_feature (4387): n equals a,t,g, or c
  misc_feature (4388): n equals a,t,g, or c
  misc_feature (4389): n equals a,t,g, or c
  misc_feature (4390): n equals a,t,g, or c
  misc_feature (4391): n equals a,t,g, or c
  misc_feature (4392): n equals a,t,g, or c
  misc_feature (4393): n equals a,t,g, or c
  misc_feature (4394): n equals a,t,g, or c
  misc_feature (4395): n equals a,t,g, or c
  misc_feature (4396): n equals a,t,g, or c
  misc_feature (4397): n equals a,t,g, or c
  misc_feature (4398): n equals a,t,g, or c
  misc_feature (4399): n equals a,t,g, or c
  misc_feature (4400): n equals a,t,g, or c
  misc_feature (4401): n equals a,t,g, or c
  misc_feature (4402): n equals a,t,g, or c
  misc_feature (4403): n equals a,t,g, or c
  misc_feature (4404): n equals a,t,g, or c
  misc_feature (4405): n equals a,t,g, or c
  misc_feature (4406): n equals a,t,g, or c
  misc_feature (4407): n equals a,t,g, or c
  misc_feature (4408): n equals a,t,g, or c
  misc_feature (4409): n equals a,t,g, or c
  misc_feature (4410): n equals a,t,g, or c
  misc_feature (4411): n equals a,t,g, or c
  misc_feature (4412): n equals a,t,g, or c
  misc_feature (4413): n equals a,t,g, or c
  misc_feature (4414): n equals a,t,g, or c
  misc_feature (4415): n equals a,t,g, or c
  misc_feature (4416): n equals a,t,g, or c
  misc_feature (4417): n equals a,t,g, or c
  misc_feature (4418): n equals a,t,g, or c
  misc_feature (4419): n equals a,t,g, or c
  misc_feature (4420): n equals a,t,g, or c
  misc_feature (4421): n equals a,t,g, or c
  misc_feature (4422): n equals a,t,g, or c
  misc_feature (4423): n equals a,t,g, or c
  misc_feature (4424): n equals a,t,g, or c
  misc_feature (4425): n equals a,t,g, or c
  misc_feature (4426): n equals a,t,g, or c
  misc_feature (4427): n equals a,t,g, or c
  misc_feature (4428): n equals a,t,g, or c
  misc_feature (4429): n equals a,t,g, or c
  misc_feature (4430): n equals a,t,g, or c
  misc_feature (4431): n equals a,t,g, or c
  misc_feature (4432): n equals a,t,g, or c
  misc_feature (4433): n equals a,t,g, or c
  misc_feature (4434): n equals a,t,g, or c
  misc_feature (4435): n equals a,t,g, or c
  misc_feature (4436): n equals a,t,g, or c
  misc_feature (4437): n equals a,t,g, or c
  misc_feature (4438): n equals a,t,g, or c
  misc_feature (4439): n equals a,t,g, or c
  misc_feature (4440): n equals a,t,g, or c
  misc_feature (4441): n equals a,t,g, or c
  misc_feature (4442): n equals a,t,g, or c
  misc_feature (4443): n equals a,t,g, or c
  misc_feature (4444): n equals a,t,g, or c
  misc_feature (4445): n equals a,t,g, or c
  misc_feature (4446): n equals a,t,g, or c
  misc_feature (4447): n equals a,t,g, or c
  misc_feature (4448): n equals a,t,g, or c
  misc_feature (4449): n equals a,t,g, or c
  misc_feature (4450): n equals a,t,g, or c
  misc_feature (4451): n equals a,t,g, or c
  misc_feature (4452): n equals a,t,g, or c
  misc_feature (4453): n equals a,t,g, or c
  misc_feature (4454): n equals a,t,g, or c
  misc_feature (4455): n equals a,t,g, or c
  misc_feature (4456): n equals a,t,g, or c
  misc_feature (4457): n equals a,t,g, or c
  misc_feature (4458): n equals a,t,g, or c
  misc_feature (4459): n equals a,t,g, or c
  misc_feature (4460): n equals a,t,g, or c
  misc_feature (4461): n equals a,t,g, or c
  misc_feature (4462): n equals a,t,g, or c
  misc_feature (4463): n equals a,t,g, or c
  misc_feature (4464): n equals a,t,g, or c
  misc_feature (4465): n equals a,t,g, or c
  misc_feature (4466): n equals a,t,g, or c
  misc_feature (4467): n equals a,t,g, or c
  misc_feature (4468): n equals a,t,g, or c
  misc_feature (4469): n equals a,t,g, or c
  misc_feature (4470): n equals a,t,g, or c
  misc_feature (4471): n equals a,t,g, or c
  misc_feature (4472): n equals a,t,g, or c
  misc_feature (4473): n equals a,t,g, or c
  misc_feature (4474): n equals a,t,g, or c
  misc_feature (4475): n equals a,t,g, or c
  misc_feature (4476): n equals a,t,g, or c
  misc_feature (4477): n equals a,t,g, or c
  misc_feature (4478): n equals a,t,g, or c
  misc_feature (4479): n equals a,t,g, or c
  misc_feature (4480): n equals a,t,g, or c
  misc_feature (4481): n equals a,t,g, or c
  misc_feature (4482): n equals a,t,g, or c
  misc_feature (4483): n equals a,t,g, or c
  misc_feature (4484): n equals a,t,g, or c
  misc_feature (4485): n equals a,t,g, or c
  misc_feature (4486): n equals a,t,g, or c
  misc_feature (4487): n equals a,t,g, or c
  misc_feature (4488): n equals a,t,g, or c
  misc_feature (4489): n equals a,t,g, or c
  misc_feature (4490): n equals a,t,g, or c
  misc_feature (4491): n equals a,t,g, or c
  misc_feature (4492): n equals a,t,g, or c
  misc_feature (4493): n equals a,t,g, or c
  misc_feature (4494): n equals a,t,g, or c
  misc_feature (4495): n equals a,t,g, or c
  misc_feature (4496): n equals a,t,g, or c
  misc_feature (4497): n equals a,t,g, or c
  misc_feature (4498): n equals a,t,g, or c
  misc_feature (4499): n equals a,t,g, or c
  misc_feature (4500): n equals a,t,g, or c
  misc_feature (4501): n equals a,t,g, or c
  misc_feature (4502): n equals a,t,g, or c
  misc_feature (4503): n equals a,t,g, or c
  misc_feature (4504): n equals a,t,g, or c
  misc_feature (4505): n equals a,t,g, or c
  misc_feature (4506): n equals a,t,g, or c
  misc_feature (4507): n equals a,t,g, or c
  misc_feature (4508): n equals a,t,g, or c
  misc_feature (4509): n equals a,t,g, or c
  misc_feature (4510): n equals a,t,g, or c
  misc_feature (4511): n equals a,t,g, or c
  misc_feature (4512): n equals a,t,g, or c
  misc_feature (4513): n equals a,t,g, or c
  misc_feature (4514): n equals a,t,g, or c
  misc_feature (4515): n equals a,t,g, or c
  misc_feature (4516): n equals a,t,g, or c
  misc_feature (4517): n equals a,t,g, or c
  misc_feature (4518): n equals a,t,g, or c
  misc_feature (4519): n equals a,t,g, or c
  misc_feature (4520): n equals a,t,g, or c
  misc_feature (4521): n equals a,t,g, or c
  misc_feature (4522): n equals a,t,g, or c
  misc_feature (4523): n equals a,t,g, or c
  misc_feature (4524): n equals a,t,g, or c
  misc_feature (4525): n equals a,t,g, or c
  misc_feature (4526): n equals a,t,g, or c
  misc_feature (4527): n equals a,t,g, or c
  misc_feature (4528): n equals a,t,g, or c
  misc_feature (4529): n equals a,t,g, or c
  misc_feature (4530): n equals a,t,g, or c
  misc_feature (4531): n equals a,t,g, or c
  misc_feature (4532): n equals a,t,g, or c
  misc_feature (4533): n equals a,t,g, or c
  misc_feature (4534): n equals a,t,g, or c
  misc_feature (4535): n equals a,t,g, or c
  misc_feature (4536): n equals a,t,g, or c
  misc_feature (4537): n equals a,t,g, or c
  misc_feature (4538): n equals a,t,g, or c
  misc_feature (4539): n equals a,t,g, or c
  misc_feature (4540): n equals a,t,g, or c
  misc_feature (4541): n equals a,t,g, or c
  misc_feature (4542): n equals a,t,g, or c
  misc_feature (4543): n equals a,t,g, or c
  misc_feature (4544): n equals a,t,g, or c
  misc_feature (4545): n equals a,t,g, or c
  misc_feature (4546): n equals a,t,g, or c
  misc_feature (4547): n equals a,t,g, or c
  misc_feature (4548): n equals a,t,g, or c
  misc_feature (4549): n equals a,t,g, or c
  misc_feature (4550): n equals a,t,g, or c
  misc_feature (4551): n equals a,t,g, or c
  misc_feature (4552): n equals a,t,g, or c
  misc_feature (4553): n equals a,t,g, or c
  misc_feature (4554): n equals a,t,g, or c
  misc_feature (4555): n equals a,t,g, or c
  misc_feature (4556): n equals a,t,g, or c
  misc_feature (4557): n equals a,t,g, or c
  misc_feature (4558): n equals a,t,g, or c
  misc_feature (4559): n equals a,t,g, or c
  misc_feature (4560): n equals a,t,g, or c
  misc_feature (4561): n equals a,t,g, or c
  misc_feature (4562): n equals a,t,g, or c
  misc_feature (4563): n equals a,t,g, or c
  misc_feature (4564): n equals a,t,g, or c
  misc_feature (4565): n equals a,t,g, or c
  misc_feature (4566): n equals a,t,g, or c
  misc_feature (4567): n equals a,t,g, or c
  misc_feature (4568): n equals a,t,g, or c
  misc_feature (4569): n equals a,t,g, or c
  misc_feature (4570): n equals a,t,g, or c
  misc_feature (4571): n equals a,t,g, or c
  misc_feature (4572): n equals a,t,g, or c
  misc_feature (4573): n equals a,t,g, or c
  misc_feature (4574): n equals a,t,g, or c
  misc_feature (4575): n equals a,t,g, or c
  misc_feature (4576): n equals a,t,g, or c
  misc_feature (4577): n equals a,t,g, or c
  misc_feature (4578): n equals a,t,g, or c
  misc_feature (4579): n equals a,t,g, or c
  misc_feature (4580): n equals a,t,g, or c
  misc_feature (4581): n equals a,t,g, or c
  misc_feature (4582): n equals a,t,g, or c
  misc_feature (4583): n equals a,t,g, or c
  misc_feature (4584): n equals a,t,g, or c
  misc_feature (4585): n equals a,t,g, or c
  misc_feature (4586): n equals a,t,g, or c
  misc_feature (4587): n equals a,t,g, or c
  misc_feature (4588): n equals a,t,g, or c
  misc_feature (4589): n equals a,t,g, or c
  misc_feature (4590): n equals a,t,g, or c
  misc_feature (4591): n equals a,t,g, or c
  misc_feature (4592): n equals a,t,g, or c
  misc_feature (4593): n equals a,t,g, or c
  misc_feature (4594): n equals a,t,g, or c
  misc_feature (4595): n equals a,t,g, or c
  misc_feature (4596): n equals a,t,g, or c
  misc_feature (4597): n equals a,t,g, or c
  misc_feature (4598): n equals a,t,g, or c
  misc_feature (4599): n equals a,t,g, or c
  misc_feature (4600): n equals a,t,g, or c
  misc_feature (4601): n equals a,t,g, or c
  misc_feature (4602): n equals a,t,g, or c
  misc_feature (4603): n equals a,t,g, or c
  misc_feature (4604): n equals a,t,g, or c
  misc_feature (4605): n equals a,t,g, or c
  misc_feature (4606): n equals a,t,g, or c
  misc_feature (4607): n equals a,t,g, or c
  misc_feature (4608): n equals a,t,g, or c
  misc_feature (4609): n equals a,t,g, or c
  misc_feature (4610): n equals a,t,g, or c
  misc_feature (4611): n equals a,t,g, or c
  misc_feature (4612): n equals a,t,g, or c
  misc_feature (4613): n equals a,t,g, or c
  misc_feature (4614): n equals a,t,g, or c
  misc_feature (4615): n equals a,t,g, or c
  misc_feature (4616): n equals a,t,g, or c
  misc_feature (4617): n equals a,t,g, or c
  misc_feature (4618): n equals a,t,g, or c
  misc_feature (4619): n equals a,t,g, or c
  misc_feature (4620): n equals a,t,g, or c
  misc_feature (4621): n equals a,t,g, or c
  misc_feature (4622): n equals a,t,g, or c
  misc_feature (4623): n equals a,t,g, or c
  misc_feature (4624): n equals a,t,g, or c
  misc_feature (4625): n equals a,t,g, or c
  misc_feature (4626): n equals a,t,g, or c
  misc_feature (4627): n equals a,t,g, or c
  misc_feature (4628): n equals a,t,g, or c
  misc_feature (4629): n equals a,t,g, or c
  misc_feature (4630): n equals a,t,g, or c
  misc_feature (4631): n equals a,t,g, or c
  misc_feature (4632): n equals a,t,g, or c
  misc_feature (4633): n equals a,t,g, or c
  misc_feature (4634): n equals a,t,g, or c
  misc_feature (4635): n equals a,t,g, or c
  misc_feature (4636): n equals a,t,g, or c
  misc_feature (4637): n equals a,t,g, or c
  misc_feature (4638): n equals a,t,g, or c
  misc_feature (4639): n equals a,t,g, or c
  misc_feature (4640): n equals a,t,g, or c
  misc_feature (4641): n equals a,t,g, or c
  misc_feature (4642): n equals a,t,g, or c
  misc_feature (4643): n equals a,t,g, or c
  misc_feature (4644): n equals a,t,g, or c
  misc_feature (4645): n equals a,t,g, or c
  misc_feature (4646): n equals a,t,g, or c
  misc_feature (4647): n equals a,t,g, or c
  misc_feature (4648): n equals a,t,g, or c
  misc_feature (4649): n equals a,t,g, or c
  misc_feature (4650): n equals a,t,g, or c
  misc_feature (4651): n equals a,t,g, or c
  misc_feature (4652): n equals a,t,g, or c
  misc_feature (4653): n equals a,t,g, or c
  misc_feature (4654): n equals a,t,g, or c
  misc_feature (4655): n equals a,t,g, or c
  misc_feature (4656): n equals a,t,g, or c
  misc_feature (4657): n equals a,t,g, or c
  misc_feature (4658): n equals a,t,g, or c
  misc_feature (4659): n equals a,t,g, or c
  misc_feature (4660): n equals a,t,g, or c
  misc_feature (4661): n equals a,t,g, or c
  misc_feature (4662): n equals a,t,g, or c
  misc_feature (4663): n equals a,t,g, or c
  misc_feature (4664): n equals a,t,g, or c
  misc_feature (4665): n equals a,t,g, or c
  misc_feature (4666): n equals a,t,g, or c
  misc_feature (4667): n equals a,t,g, or c
  misc_feature (4668): n equals a,t,g, or c
  misc_feature (4669): n equals a,t,g, or c
  misc_feature (4670): n equals a,t,g, or c
  misc_feature (4671): n equals a,t,g, or c
  misc_feature (4672): n equals a,t,g, or c
  misc_feature (4673): n equals a,t,g, or c
  misc_feature (4674): n equals a,t,g, or c
  misc_feature (4675): n equals a,t,g, or c
  misc_feature (4676): n equals a,t,g, or c
  misc_feature (4677): n equals a,t,g, or c
  misc_feature (4678): n equals a,t,g, or c
  misc_feature (4679): n equals a,t,g, or c
  misc_feature (4680): n equals a,t,g, or c
  misc_feature (4681): n equals a,t,g, or c
  misc_feature (4682): n equals a,t,g, or c
  misc_feature (4683): n equals a,t,g, or c
  misc_feature (4684): n equals a,t,g, or c
  misc_feature (4685): n equals a,t,g, or c
  misc_feature (4686): n equals a,t,g, or c
  misc_feature (4687): n equals a,t,g, or c
  misc_feature (4688): n equals a,t,g, or c
  misc_feature (4689): n equals a,t,g, or c
  misc_feature (4690): n equals a,t,g, or c
  misc_feature (4691): n equals a,t,g, or c
  misc_feature (4692): n equals a,t,g, or c
  misc_feature (4693): n equals a,t,g, or c
  misc_feature (4694): n equals a,t,g, or c
  misc_feature (4695): n equals a,t,g, or c
  misc_feature (4696): n equals a,t,g, or c
  misc_feature (4697): n equals a,t,g, or c
  misc_feature (4698): n equals a,t,g, or c
  misc_feature (4699): n equals a,t,g, or c
  misc_feature (4700): n equals a,t,g, or c
  misc_feature (4701): n equals a,t,g, or c
  misc_feature (4702): n equals a,t,g, or c
  misc_feature (4703): n equals a,t,g, or c
  misc_feature (4704): n equals a,t,g, or c
  misc_feature (4705): n equals a,t,g, or c
  misc_feature (4706): n equals a,t,g, or c
  misc_feature (4707): n equals a,t,g, or c
  misc_feature (4708): n equals a,t,g, or c
  misc_feature (4709): n equals a,t,g, or c
  misc_feature (4710): n equals a,t,g, or c
  misc_feature (4711): n equals a,t,g, or c
  misc_feature (4712): n equals a,t,g, or c
  misc_feature (4713): n equals a,t,g, or c
  misc_feature (4714): n equals a,t,g, or c
  misc_feature (4715): n equals a,t,g, or c
  misc_feature (4716): n equals a,t,g, or c
  misc_feature (4717): n equals a,t,g, or c
  misc_feature (4718): n equals a,t,g, or c
  misc_feature (4719): n equals a,t,g, or c
  misc_feature (4720): n equals a,t,g, or c
  misc_feature (4721): n equals a,t,g, or c
  misc_feature (4722): n equals a,t,g, or c
  misc_feature (4723): n equals a,t,g, or c
  misc_feature (4724): n equals a,t,g, or c
  misc_feature (4725): n equals a,t,g, or c
  misc_feature (4726): n equals a,t,g, or c
  misc_feature (4727): n equals a,t,g, or c
  misc_feature (4728): n equals a,t,g, or c
  misc_feature (4729): n equals a,t,g, or c
  misc_feature (4730): n equals a,t,g, or c
  misc_feature (4731): n equals a,t,g, or c
  misc_feature (4732): n equals a,t,g, or c
  misc_feature (4733): n equals a,t,g, or c
  misc_feature (4734): n equals a,t,g, or c
  misc_feature (4735): n equals a,t,g, or c
  misc_feature (4736): n equals a,t,g, or c
  misc_feature (4737): n equals a,t,g, or c
  misc_feature (4738): n equals a,t,g, or c
  misc_feature (4739): n equals a,t,g, or c
  misc_feature (4740): n equals a,t,g, or c
  misc_feature (4741): n equals a,t,g, or c
  misc_feature (4742): n equals a,t,g, or c
  misc_feature (4743): n equals a,t,g, or c
  misc_feature (4744): n equals a,t,g, or c
  misc_feature (4745): n equals a,t,g, or c
  misc_feature (4746): n equals a,t,g, or c
  misc_feature (4747): n equals a,t,g, or c
  misc_feature (4748): n equals a,t,g, or c
  misc_feature (4749): n equals a,t,g, or c
  misc_feature (4750): n equals a,t,g, or c
  misc_feature (4751): n equals a,t,g, or c
  misc_feature (4752): n equals a,t,g, or c
  misc_feature (4753): n equals a,t,g, or c
  misc_feature (4754): n equals a,t,g, or c
  misc_feature (4755): n equals a,t,g, or c
  misc_feature (4756): n equals a,t,g, or c
  misc_feature (4757): n equals a,t,g, or c
  misc_feature (4758): n equals a,t,g, or c
  misc_feature (4759): n equals a,t,g, or c
  misc_feature (4760): n equals a,t,g, or c
  misc_feature (4761): n equals a,t,g, or c
  misc_feature (4762): n equals a,t,g, or c
  misc_feature (4763): n equals a,t,g, or c
  misc_feature (4764): n equals a,t,g, or c
  misc_feature (4765): n equals a,t,g, or c
  misc_feature (4766): n equals a,t,g, or c
  misc_feature (4767): n equals a,t,g, or c
  misc_feature (4768): n equals a,t,g, or c
  misc_feature (4769): n equals a,t,g, or c
  misc_feature (4770): n equals a,t,g, or c
  misc_feature (4771): n equals a,t,g, or c
  misc_feature (4772): n equals a,t,g, or c
  misc_feature (4773): n equals a,t,g, or c
  misc_feature (4774): n equals a,t,g, or c
  misc_feature (4775): n equals a,t,g, or c
  misc_feature (4776): n equals a,t,g, or c
  misc_feature (4777): n equals a,t,g, or c
  misc_feature (4778): n equals a,t,g, or c
  misc_feature (4779): n equals a,t,g, or c
  misc_feature (4780): n equals a,t,g, or c
  misc_feature (4781): n equals a,t,g, or c
  misc_feature (4782): n equals a,t,g, or c
  misc_feature (4783): n equals a,t,g, or c
  misc_feature (4784): n equals a,t,g, or c
  misc_feature (4785): n equals a,t,g, or c
  misc_feature (4786): n equals a,t,g, or c
  misc_feature (4787): n equals a,t,g, or c
  misc_feature (4788): n equals a,t,g, or c
  misc_feature (4789): n equals a,t,g, or c
  misc_feature (4790): n equals a,t,g, or c
  misc_feature (4791): n equals a,t,g, or c
  misc_feature (4792): n equals a,t,g, or c
  misc_feature (4793): n equals a,t,g, or c
  misc_feature (4794): n equals a,t,g, or c
  misc_feature (4795): n equals a,t,g, or c
  misc_feature (4796): n equals a,t,g, or c
  misc_feature (4797): n equals a,t,g, or c
  misc_feature (4798): n equals a,t,g, or c
  misc_feature (4799): n equals a,t,g, or c
  misc_feature (4800): n equals a,t,g, or c
  misc_feature (4801): n equals a,t,g, or c
  misc_feature (4802): n equals a,t,g, or c
  misc_feature (4803): n equals a,t,g, or c
  misc_feature (4804): n equals a,t,g, or c
  misc_feature (4805): n equals a,t,g, or c
  misc_feature (4806): n equals a,t,g, or c
  misc_feature (4807): n equals a,t,g, or c
  misc_feature (4808): n equals a,t,g, or c
  misc_feature (4809): n equals a,t,g, or c
  misc_feature (4810): n equals a,t,g, or c
  misc_feature (4811): n equals a,t,g, or c
  misc_feature (4812): n equals a,t,g, or c
  misc_feature (4813): n equals a,t,g, or c
  misc_feature (4814): n equals a,t,g, or c
  misc_feature (4815): n equals a,t,g, or c
  misc_feature (4816): n equals a,t,g, or c
  misc_feature (4817): n equals a,t,g, or c
  misc_feature (4818): n equals a,t,g, or c
  misc_feature (4819): n equals a,t,g, or c
  misc_feature (4820): n equals a,t,g, or c
  misc_feature (4821): n equals a,t,g, or c
  misc_feature (4822): n equals a,t,g, or c
  misc_feature (4823): n equals a,t,g, or c
  misc_feature (4824): n equals a,t,g, or c
  misc_feature (4825): n equals a,t,g, or c
  misc_feature (4826): n equals a,t,g, or c
  misc_feature (4827): n equals a,t,g, or c
  misc_feature (4828): n equals a,t,g, or c
  misc_feature (4829): n equals a,t,g, or c
  misc_feature (4830): n equals a,t,g, or c
  misc_feature (4831): n equals a,t,g, or c
  misc_feature (4832): n equals a,t,g, or c
  misc_feature (4833): n equals a,t,g, or c
  misc_feature (4834): n equals a,t,g, or c
  misc_feature (4835): n equals a,t,g, or c
  misc_feature (4836): n equals a,t,g, or c
  misc_feature (4837): n equals a,t,g, or c
  misc_feature (4838): n equals a,t,g, or c
  misc_feature (4839): n equals a,t,g, or c
  misc_feature (4840): n equals a,t,g, or c
  misc_feature (4841): n equals a,t,g, or c
  misc_feature (4842): n equals a,t,g, or c
  misc_feature (4843): n equals a,t,g, or c
  misc_feature (4844): n equals a,t,g, or c
  misc_feature (4845): n equals a,t,g, or c
  misc_feature (4846): n equals a,t,g, or c
  misc_feature (4847): n equals a,t,g, or c
  misc_feature (4848): n equals a,t,g, or c
  misc_feature (4849): n equals a,t,g, or c
  misc_feature (4850): n equals a,t,g, or c
  misc_feature (4851): n equals a,t,g, or c
  misc_feature (4852): n equals a,t,g, or c
  misc_feature (4853): n equals a,t,g, or c
  misc_feature (4854): n equals a,t,g, or c
  misc_feature (4855): n equals a,t,g, or c
  misc_feature (4856): n equals a,t,g, or c
  misc_feature (4857): n equals a,t,g, or c
  misc_feature (4858): n equals a,t,g, or c
  misc_feature (4859): n equals a,t,g, or c
  misc_feature (4860): n equals a,t,g, or c
  misc_feature (4861): n equals a,t,g, or c
  misc_feature (4862): n equals a,t,g, or c
  misc_feature (4863): n equals a,t,g, or c
  misc_feature (4864): n equals a,t,g, or c
  misc_feature (4865): n equals a,t,g, or c
  misc_feature (4866): n equals a,t,g, or c
  misc_feature (4867): n equals a,t,g, or c
  misc_feature (4868): n equals a,t,g, or c
  misc_feature (4869): n equals a,t,g, or c
  misc_feature (4870): n equals a,t,g, or c
  misc_feature (4871): n equals a,t,g, or c
  misc_feature (4872): n equals a,t,g, or c
  misc_feature (4873): n equals a,t,g, or c
  misc_feature (4874): n equals a,t,g, or c
  misc_feature (4875): n equals a,t,g, or c
  misc_feature (4876): n equals a,t,g, or c
  misc_feature (4877): n equals a,t,g, or c
  misc_feature (4878): n equals a,t,g, or c
  misc_feature (4879): n equals a,t,g, or c
  misc_feature (4880): n equals a,t,g, or c
  misc_feature (4881): n equals a,t,g, or c
  misc_feature (4882): n equals a,t,g, or c
  misc_feature (4883): n equals a,t,g, or c
  misc_feature (4884): n equals a,t,g, or c
  misc_feature (4885): n equals a,t,g, or c
  misc_feature (4886): n equals a,t,g, or c
  misc_feature (4887): n equals a,t,g, or c
  misc_feature (4888): n equals a,t,g, or c
  misc_feature (4889): n equals a,t,g, or c
  misc_feature (4890): n equals a,t,g, or c
  misc_feature (4891): n equals a,t,g, or c
  misc_feature (4892): n equals a,t,g, or c
tattnnnnnnnnnnnnnnnnnnnnnnnnnnnnnnnnnnnnnnnnnnnnnnnnnnnnnnnnnnnnnnnnnnnnnnnnnnnnnnnnnnnnnnnnnnnnnnnnnnnnnnnnnnnnnnnnnnnnnnnnnnnnnnnnnnnnnnnnnnnnnnnnnnnnnnnnnnnnnnnnnnnnnnnnnnnnnnnnnnnnnnnnnnnnnnnnnnnnnnnnnnnnnnnnnnnnnnnnnnnnnnnnnnnnnnnnnnnnnnnnnnnnnnnnnnnnnnnnnnnnnnnnnnnnnnnnnnnnnnnnnnnnnnnnnnnnnnnnnnnntgagatagaatctcactctgttgcccaggctggggtgcagtggtgcgatctcagctccccacaacctctgcctccagggttcaagcaattctcctgcctcagcctcctgagtatctgggattacaggcatgcaccactacgcttggctaatttttgtatttttagtagagacggggtttcaccatgttggccaggctggtcttgaactcctgacctcaggtgattcgcccgccttggcctcccaaagtgctgggattacaggcatgagccaccgtgcctggctgaaagttcattttcaatagcatagtccagaccattttttttctaaatgtgctaccagaatcaaagaaataataacattccattaaaacaaataaaatggcattaaattaaatgttctgcataatttaagagccctgaccaattttagtcttttttttttttttgagacagagtctcactgtgtcgcccaggctggagtgcagtggtacgatcttggctcactgcagcctccacctcctgggttcaagtgattctcctgcctcaacctcccgagcagctgggattacaggcatgtgccaccatacctggctaatttttatatctttagtagagatggggtttcaccatgttggccaggctggtctcaaactcttgacctcaggtgatctgcccgcctcggcctcccaaagtgctggcattacaggcatgagtcactgcgcctggcctagtctattattaacaaataaaaattttaatacataaaaatggatggatattttctagagccttaattaagtaattcactccaaatgtcttttttttttttttttttagctagtaagtggagacactttgaaacatggtgcttaaaaaaaaacacactacctacctggtgggctgtttcatggtgaaataacttattctgtataatttgaatgcaattcagatactatgtagatgttaaaaagctaagttaacataaaatgtacatcatgaaacgtcaccttacttgacggcattaatacattttttccactaaaatacttgtaaccatggccatcagtatgaagaaaaattttaaacacgatgaaaggtggaaacgtttcacctctaaatctgaaataaagataaaaatttagttatttggcatcaggttttgggctcagttgcttttcccccttatacttaagatagttcatatagtttcttgcatacagggtaaaggctatgtcagagcatgtaaagaactggtaatgaaatggatcacataggatgtaagacccacactttggtgtactcacaactattctcatacctgtgtaagactgaatacagaatgggagatgagagctactctcatggcaacttttagccacagagtcatgcctcggtttctttacataacaaatgtaaataagaataacacatttactttgtaattaagttctgagaagttacaagaatttaaaaaatccatatctaagatttcctcatattaactaagtacttcttgaaataaatcagcatagatacattacctgaatctaattttacactgcatagtaggatccttaataagcttagcctctaagggggccactttcttcagtatttcatgtgttacatagaattcctgaaataaaggacagtgctgtaaaaggaaagcagtatcccacccagacacaatttatggactataacagaggcaacgtggtaaagtgaacattatgctggacttggagttctgaaggggtgggtttttgttttggcacctccacttactatctgtgtagccttgagccagttacttaatcattttggcctccaactttggttatctgtcccttttagagatcaaaggcactattatttccctatgacagcacttttcacaatatattataattacttatcaacttgtctgtgcctcctactagactgtaagcttcatgaaggtagggatggtggcttttctctttaccactatattcctagcatctaatacagtgcctggaacacagcagatgcttaagaagtatttgttgaatgaatcactgtaagatgaggatgataatagtaataagttactagcttttaagcaccttttatgtaccatatactactatgttaggtgccttatatacattagctcatttaatccttacatcagcaacactatgagaattttttgtttgttttgagacagagtctcgctccgtcgcccaggctcgagtgcggtggcatgatctcggctcactgcaacctccgcctcccaggttcaagcgattctcctgcctcagcctcccgagtagctgggactacaggcacctgccaccacgcccggctaattttgtattttttcagtagagacggggtttcaccatattggccaggctggcctggaactcctgaccttgtgagccgcacgcctcagcctcccaaagtgctgggattacaggtgtgagccaccactcaggctgcagtgcaatggcatgatctcggctcaccgcaacctccacctcccaggttcaagtgattctcctgctcagcctcctgagtagctggaattacaggcatgcgccaccatgcctggctaattttgtatttttaatagagatggggtttcttcatgttggtcaggctggtctcgagctcccgacttcaggtgatccacccgcctcagcctcccaaagtgctgggattacaggcgtgagccactgcacctggcccattatgagaatattatcacgcctattttacagatgagaaggctgaggctcagggaatttttgtaatttataaaaaggcatacaggtagtgaatggggaagccaggattcatttagttctgtttgactctaaagtcccaactctttcccccaaacaaccccaaccaaccccgttatgcctatgataatcacataaaaatgtacactaaagagcttttaggctgggcactgcggctcacgcctataatcctggcactttgggaggccaaagcgggaggatcacctgaggtcaagagttcgagaccaacctggtcaacatggtgaaaccccatctctactaaaaatacaaaaattagccaggcgtgatggcaggcgcctgtagtccaagctatttgggaggctgaagcaggagaatcgcttgaacccgggaggcagaggttgcagggagccgagatcgtgccactgcactccagcctgggtgacagagcaagactctgctcaaaataaataaataaatagcttttaaaaggacaaagcattattaatttaaggtattaaagtattactataacagataaaaaagaatttccttctgttacaaaagtctaaaaatactatgaaaccagcattataaaattaaatacaagttccatattcaaagacaatggataatagacctgaaatgccaggagtttacctgggtgggttttctctgaagtattcagacggagtcttgctctgtcgcccaggctggagtgcagtggctcaaactcggctcactataacctccacctccccggttcaaggtagctgggattacaggcgcacaccaccatgcccggctaatttttttgtatttttaggagagacggggtattcaccatggtgaccggactggtctcgaactnnnnnnnnnnnnnnnnnnnnnnnnnnnnnnnnnnnnnnnnnnnnnnnnnnnnnnnnnnnnnnnnnnnnnnnnnnnnnnnnnnnnnnnnnnnnnnnnnnnnnnnnnnnnnnnnnnnnnnnnnnnnnnnnnnnnnnnnnnnnnnnnnnnnnnnnnnnnnnnnnnnnnnnnnnnnnnnnnnnnnnnnnnnnnnnnnnnnnnnnnnnnnnnnnnnnnnnnnnnnnnnnnnnnnnnnnnnnnnnnnnnnnnnnnnnnnnnnnnnnnnnnnnnnnnnnnnnnnnnnnnnnnnnnnnnnnnnnnnnnnnnnnnnnnnnnnnnnnnnnnnnnnnnnnnnnnnnnnnnnnnnnnnnnnnnnnnnnnnnnnnnnnnnnnnnnnnnnnnnnnnnnnnnnnnnnnnnnnnnnnnnnnnnnnnnnnnnnnnnnnnnnnnnnnnnnnnnnnnnnnnnnnnnnnnnnnnnnnnnnnnnnnnnnnnnnnnnnnnnnnnnnnnnnnnnnnnnnnnnnnnnnnnnnnnnnnnnnnnnnnnnnnnnnnnnnnnnnnnnnnnnnnnnnnnnnnnnnnnnnnnnnnnnnnnnnnnnnnnnnnnnnnnnnnnnnnnnnnnnnnnnnnnnnnnnnnnnnnnnnnnnnnnnnnnnnnnnnnnnnnnnnnnnnnnnnnnnnnnnnnnnnnnnnnnnnnnnnnnnnnnnnnnnnnnnnnnnnnnnnnnnnnnnnnnnnnnnnnnnnnnnnnnnnnnnnnnnnnnnnnnnnnnnnnnnnnnnnnnnnnnnnnnnnnnnnnnnnnnnnnnnnnnnnnnnnnnnnnnnnnnnnnnnnnnnnnnnnnnnnnnnnnnnnnnnnnnnnnnnnnnnnnnnnnnnnnnnnnnnnnnnnnnnnnnnnnnnnnnnnnnnnnnnnnnnnnnnnnnnnnnnnnnnnnnnnnnnnnnnnnnnnnnnnnnnnnnnnnnnnnnnnnnnnnnaaaaaaaaaattagctgggcatggcggcacgcacctgtagtcccagctactagggaggcggaggcaggataatcccttgaacctgggtggtggaggttgcagtgagccaagatcatgcccctgcactccagcctgggcaacagagtgagacttcatctcaaaaaagaaaagaaaaaaaagagtatcactaataata

SEQ ID NO: 675 - DNA, 115 bp, Homo sapiens
tagtagagatggggtttcaccatgttggccaggatggtctcgatctcctgacctcgtgatccacccaccttggcctcctaaagtgctgggattacaggcgtgagccactgcgccc

SEQ ID NO: 676 - DNA, 228 bp, Homo sapiens
tcgaggtcaggagattgagaccatcctggctaacatggtgaaaccccatctctactaaaaatacaaaaaaaattagccgggcgtggtggcgggagcctgtagtcccagctactcgggaggttgaggcaggagaatggcgtgaacctgggaggcggagcttgtagtgagccaagatcatgccactgcactccagcctgggcgacagagcgagactccgtctcaaaaaaa

SEQ ID NO: 677 - DNA, 12304 bp, Homo sapiens
cagatgttttgttttttttttttgtttttttttttgagacggagtctcgctctgtcgcccaggctggagtgcagtggcgggatctcggctcactgcaagctccgcctcccgggttcacgccattctcctgcctcagcctcccaagtagctgggacgacaggcgcccgccactacgcccggctaatttttttgtatttttagtagagacggggtttcaccgttttagccgggatggtctcgatctcctgacctcgtgatccgcctgcctcggcctcccaaagtgctgggattgcaggcgtgagccaccgcgcccggccactcagatgttatttaagaaagttttttttttaaaactgtaacaggaagattacttgaggaacctttaatgctactttaatgcttcatgctgatttgtgtgtgtgtgtgtgtgtgtgtgtgtacagtagcacagtctcagctcactgcagcctccacctcctaggctcaagtgaacctcccacatcagcctccgaagtagctgggaccacaggcacgtaccaccatgcgcggctaatttttttgtattttttgttagagacagggttttaccatgttgcccaggctggtctcaaactcttgagctcaggagattcacccgcctgggcctcccaaattgctaggattacaggtgtgagctatcacgcctggactgatttttactgttttgatttttctttttctttttgagacagagtctcaccctgtcgcccaggctgaagtgcaatggtgcgatctcggctcactgcaacctctgcacccagagttctagtgactctcctacctcagcctccccagtagctgggattacaggtgcctgccactacacccagctatttttttttgtatttttagtagagacagggtttcgcatgttggccaggcaggtcttgaactcctgatttcaggtcatctacccacctcggcctcccaaagtgctaggattacagttgtgagccagcaggcctggccactggtttgattttatttaccaaattagttgagcactatttgtatggcaagcatggatataaaatttaaaaataaaacataattgttggttttatgaaacttatatgtggtgttcaaaaaaaatctgtaatctgtccatatgagttaagcagcccaactgtaaatatgatcaatcctagtatgtagaaagtagtttggcagccagccttggtgcctcacagctgtaatcccagcactttaggatgctgtaccagcttgaggccaggagtttgagacagcctgggcaacatggtgagaccccatctctatttaaaaaaaaaaaaaatagttcaggatttaaaaaaaaatgaaaaacaagtcttgacagaatttaagttgtttttaattgatacaaactttttgtagtaagctaacttaaatttcagttgttcttttttaatgcctgaaacaattattttctgtgtacggctcagtaatttgtaatggaatgcacttactgataattaattcatagatgttttgtttaagagctttgctagggctgatttctatagaacatttaataactttttctttgattttttttattgtggtgaaatatatttatacaacattaaatttgccattttaaccacttgaaatgtacaattgaaggccattaattacattcacaatgttgtgcaacgattactaccatctattctttcccaatccctagtaacttctaatctactttctgtctctaccaatttacctcttctagatatttaatgtaagtggaataataaaatatttgtatttttgtgtctgactactttcatttagtataatattttcaaggttcatctgtgttgcagtatgtaccagaatttcattcctttttaatgctcagtaatactctattcaggtggacattttgcaccttttggctaaactggatactgcagtgaacattggcatacaattattggtttaagtccctatttgcaattcatctgggtatgttccttggaatggaattgctgggttgtttttgtaattcgctgtggttagcttcttcaggaactgccatattgtttttcacagaacctgcaatattttacattcctaccagcaatgtacacatgtcaatttctctacctccttgcccacacttgctattttctttcttttcttatcccatcttagttggtgtccttttggtttgtatttctctaaccagtaatgatattaagcatcttttcatgtgcttattggccatttgtatgtctttatagaaatgtctattcaaattcattgcccctttttaaattagttatttatttatttatttgagatgaagtcttgctgttgtcccccaggctggagtgtgatggtgtgatctaggctcactgcaacctctgcctcctgggttcaagcaattctcctgcctcggccccatgagtagctgggattacaggcacctaccaccatgcctggctaatttttaggtttttaatagagacggggtttcaccatgttggccaggctggtctagaactcctgacctcaggtgatccacccccgcctcggctttccaaagtgctgggattacaggcgtgagccactgcgcctggaccattgcccattttttaatttggttgtttgtgtttttgatgttgagttttaggagatccttattatatattcttgatattagacctttatccaatatatgatttgcaaatattttctctcatttaaacccaatcaaaagtttatctttttagtttcttgataatgtcctctgatgaacgaaagtttttaattttgacgaagtcagatttatctgttttttctttcattgtcttgtgctttttgtgtcagatcttaagaattcattgccaaatccaaggtcatgaggatttgcccctatgttttcttctaagagatttatggttttagctcttatatttaggtcattgatatattttcagttaatttttgtgtttggtatgagttaggagtccaacgtcattcttttgcttgtggaaatccagttgtcccagcaccatttgttgagcagggtcttatttctccattgaatggacttggcacaaatcagttggtcatagatgtatcagtttattttggtatgctcagttttatgctgttggtctatatgtctatgctttttcagtaccatattattttgattactgtagcattgtagtaagttctgaagtcagaaagtgtgagtgttccaacttttttttttcttgattgttttggcttttcagtgtcccttgcagctctgtgaatttgagggtcagcatttccgtttctgcaagaaaagattttggaattttgatagagattgcatcgaatctgtacattgctctaggtagtattgatgtcaacaatattaagtcttcctactcaataactcagaatggcttttaatttattttggttattttaaattttctgcagcagcgtattgtagttttcagggtaaaactcacctccttggttaaatctctttctaggtactcttttagatgttattgttcttttcaatgttaaatggaattgcattcctaatttctttttcagattattcattgcatatgcatagaaacacaactacttaaattttttttttaagttatttatttttttgagacagggtctcgccctgtcacccagactggagtgcagtggcgtgatcacagctaactgtagcctcaacttcctgggctccagcaatcttcccatctcagcctcctgagtagttgggactacaggtgcatgccaccacaccacacatcacactggctaatttttgtatttttggtaagacagggttttgccttgttggccaggatggtcttgaactcctctgctcaagtgatccaccagcctcagcctcccaaagtgctgggattatgggcgtgagctaccatgcccggccgcaccagtctttcttttccagaatctatataacctgatcttctggacttcaaaatccttgttgtttcccctcacctataacccttttaaaacgaagcggaattcttcttttttttttttttttttttttttttgagatggagtcttgctctgttgcccaggctggagtgcagtagtatgatcacggctctctacagccttggcctcctgggttttagtgatcctcctacctcaacctagtctagctgagtagctaggactacaagtgtgtaccaccacacccacctaattttttttcccctttggtaaagatgaactctcattatgttgcccacactggtcttgaactcgtaggctcaagctatcctcctgccttagcctcccaaagtgctgggtttacaggtatgagctaccacaccgggccaaagtggcactttttttttttttttttttttttgagacagagtctcgcactgtcacccgggctggaatgcaatggcatgatctcagctcactgcaacctctgcctcccaggttcaagtgattctcctgcctcagcctcccgagtagctgggattatggggcctgccaccacgcctggctaatttttgcatttttagtagagatggggtttctccatgttggtcaggctggtctcgaactcctgacctagtgatccgcccacctcagcctcccaaagtgctgggattacaggcatgagccactgagcctggcctaaagtagtactttttaattaaaaaaagaatcaaaatgaaactcaatacataggcaggtcataaaaaatgattttttcttttgctcaagcagtgagtagcattaagctgttccctcaccttcacctggtgttacctggagtacatttgggaagtcctcaactttgaaaaccctttttccctatatactgctggtaattaaaagcaaaaaattattctgaagtttgtcaagcattttatgaaggagacattgctagtttgttttctgtttttttttaagtatattttaaacatttccttatactcctaatataaatgttgctttgtcagaaatttcaacatttggaacaaaatttttatagtttctaaataaatataattcaaaccaggtatagttaggatgggtgcctataatgctgtcaggatacgtataatgctatgcataaagtttatttctgtatcatctagttgttcaacagttgatctaggcataataatgaaactacttttgcagtttgatatagtttggatatttgacccctccaaatttcatgttgaaatttgtccacctccaatctcacgtctcagtgttagacagtgggggcctggtgggaagtgtttggggtcatggggcaggtccctcatgaatgggttggtaccatccttgtcccagaggtaatgtgtgaattcctgctctattcgttcatgtgagaattggttgttcagaagagtgtgacacacttcccctctctcttgccatgtgacacatttgctccccctttggctctgccatgattggaaacctcctgaggtccttaccagaagcagatgctagcggcacgcttcttgtacagcctgcagaactgttagccaagtaaaactctttactttataaattacccagcctcaggtatttctttatagcaatgcaaatagactaaaagacagttaaacacatttttgtttttgtttttctccatgtctccttgctgtattttattatttttctgagacaaggtctcactctgttgcccaagctggagtgcagtggtgcagtctcggcacactgcaacctccccctcctgggcttaagtgatcctccctcctcagcctctcaagtagctaggactaaaggtgtgtaccaccacacccagctatttttctttaaattttttgtagagacagggtctcactgtgttgcctaggctggtcttgaactcttagtctcaaggaatcctcctgccttggcttcccaaactgcttggatcacaggtatgagtcaccacgcctggcctgctcttttgtttctatatgttagactttttgcagatttccatatataagcgatgtcatcagtattttctttcagtgtctggcttattttactgagtgtaatgtcctctgggtttattatccgtgtagttgcaaatggcagtatctcattttttaaggctgaatgatattccattgtgtgtatctgtgtgtatcacaatttcttttttcattcatctgtcagttgacacattgtttccataacttggctattgtgactaatactgcaatgaacacagtagcacagatatctctaccaggtgctgatttcatttcctttgagtacatacccagctaggtcatatggtagttctatttttaagtttttgaggaacctccattactgttttccataatggctgtgccaatttatattcccatccacagtctacaagggtttccttttctccacaccctcaccaacacttgttatctcttaccaaaagagtcattctaacaggtgtgagatgatatctcattgtggttttgatttgcatttctctgatgattagtgatgttgagtaccttttcatatacctgtttgtcattagtatgtcttcttcagaaaaaaacagtcttggccgggcacagtggctcatgcctgtaatcccagcactttgggagggcgaggcaggtggatcacttgaggtcaggagtttgagaccagcctggccaaaatggggaaaccccatctctactaaaaattagcagggcccgtaatcccggctactccagaggctgaggcaggagcatcacttgaactggggaggtggaggttgcagtgagtcaagatcgtgccacttcactccagcctgggcacagagtgagactctgtctccaaaacaataaaaaaagatatatggtttgtaaacattttctcccagtctgtagggtgccttttcattgtgttgattgtttcctttgctgtgcagaagctttttagtttgatgtagtccaagttgtttatttttgcttttgttgcctgggcttttggtatgccatacaaaaaaatatcaaggaactagtattaacctatacaattcagtagtttttagtatatttacagagctgtgcaactattgcacaatcaattataaatcattttcatcacctcagaaagaactccataccctttagccatcatcctccaaacctccagccccaggtaaccattaatctattttctgtctttatggatttgtctgttctggacatttcatataaagggactcataatatgtagtctttcatgactgccttttttcacttagcaaaatgttttcaaggttcatccatattttagcatgtatcagtacttcatttctacgactaaatagtattgtgttgcattgatgtatactacattttgcttatacattcatcaatagatgaacatttgggttgtttctacctattggctattaagaatagctgcatattttcattcccactagcagtgtggaaggctttcagtttctatattttcaccaacacttgtcttttttattctagccatcttagtggatatgaggtgatatctcattgtggttttcatttgtattaccctaataattgatgatgaacattttttcatgtgcatattgaacatttgtagatcttgtttgaagaaatatctgttcagatcctttgcccattttaaaattgggttgtctttttactgttgagttgtaagaatattttttttttgaggtgtggtctcgctttgttgccctggctggagtgcagtggcacaatcttggctcactgcaacctccaccttccgggttcaggcaattctcctgcctcagcctcctgagtagctgggaccacaggcgcctgccaccacacctgggtaattttttgtatttttagtagagatggggtttcaccgtattagacaggatggccttgatctcctaacttcgtgatctgcctgcctcggcctcccaaagtgctgggattacaggcgtgagccaccgcacccggccaaattttttatatattctgaatgtaagttccttatcaaatatatgaatcgcaagtattttttcccattatgtgaagtgaagtcttcttatagatatagtattgtgattaataacaaatagttaatttaggagagtagagtacaagctgtagcagtgggagttttgtcagcacacgcttttagaaggtttcttccactgtatgaccgtgtattgatgaaaggaatgtgcctgaaactgtaaccaaaggagacatgcttccagaaaaatctcaaggaaaagtattgtaagcaacagtagatgttggatcagactctaaagtaaagggtggagagttaaccagttaacatgtaagttggagatagagttctcccagaatatgtaggcaccaaagtagttctagacaacaaggattacttctcatttaaagatggtgacattcttgcaaactatatagactgaaataaatcatattgaaatggcatcaacatgaagctgcccattctgtaattctgaaatcttctatcatgtaaaataattttcatgtctttcttttgtaataaactaatgatatctaaactaatgatgcccagtgtttctaaaatttagttttgctgtattgatataaacatttcctaataaaaatatgtaaatttaaaaatagttaatttaaagcttatatagattccaagaaataataatgttcagcacttaaactgttttaatcaagggttaagaattaacttcactgggcaaagtggctcacacctgtaatcccagcactttgggaggccaaggcacgtggattgcttgagctcaggagttcaagacatgcctgggcaacatggtgaaactccatccctaccaaaaatgcaaaaaattagctgggcatgatggtgcatgcctgtaatcccagctactggggaggctgggatgggagaatcacttgagcccaagcctgggaggcagaggttgcaatgagctgagatggcgctgctgtactccagcctgggtgacagagcgagaccccatctcaataaaaaaaaaaaaagaaaaaaaagaggtcttgtgctttagatcagtggttgccaaactttatcaagcatcagaatcacttggacagcttgttaaaacattctttgctagcctgcattcccagagtttctgaatcagaaagtcttgagtggggcatccaggaatttacatttttaacagaacatgttgatgctttggttcatggaccgcttccttaatggtccctataactgtcataaagaattaggtatatgctgatatgtaggaaattctacctgataaaaatgacaaaattttaatttatagctcatatttgcatctcttcaatttgcatatatttgtatatataaagtgttatatagtcatggttggtgcctaaattgttggatttcttttaaaactcttgccatacataaagtctacttttttccgtaggcttgtctcctgtcagatcctcatgaatttccttgagtttaagaaaatagtaaagaatgttacagcttaaagagattttatagatcatccaactcttcccatccctcatagagattggttaaatctcttaatccaagattgtgtagctaattattggtaggtataggtagctcttagggattttatttctggcaattctttatattgcttgaagaaaagtaaatatgtatttcagccaagattttttttttttttgagatggagtctcgctctgttgcccaggctgtagtgcagtggcgcgatctcggctcactgcaagctccacctcctgggtttacaccattctcctgtctcagcctcccgagtagctgggactacaggcgcccgccaccacatccggctaatttttttgtatttttagtagagacggggtttcaccatgttagccaagatggtctcgatctcctgacctcgtgatccgcctgccttggcctcccaaagtgctgggattacaggcgtggaccaccgtgcccggccagccaagatatttttagtgactttcaaatacagatctctttggtaacattttattaggtaataaataagcttaagatatttgaaatgacttgattctgtgctaaatgctatttgattattttacaccaaagtaatacatgaatatagcctgataaataatttttaaaaagtatgtctcataggcatctcttttattctggtcttaaaacatatgagaaagaagatagttgaagagtatgtgctagtgagatggggcacagatttccatcaataaacttatgtaaaattgagtagaatgaacaggttgtttcctagagatgtcttaaacctattagaaagtttagagggaatgatgaggaagggatatgtaatgtaaaaatataaggctatcctcttccttcttttaaaaactttatctctagccaagtctgcttaaggagaaagtcttgctttcccctgtctaggttatagcttgtagatgttcattttaatacttactgaattattaaaatctttttttccttagcccttcaccttagtagtcaatcaaggtttgtttttctaaattagatgatctgcgttgtttcttttataggaggaatttgggtagccaaatagctccacataaacatctagcttctcaggtatcaactgtaaaatgcatagaaaatgctattaaacactaaaaagagattgaaagcaccgttgactgacttgtgaaattatttcctaattgcctttggtcagcacatacctagacttctacacacccaacagtctatctcaaccattctgtaatgttactaaaataattttcctgcttcattgttaaaactctaatgattcctctctgtcctctttgcacatggctctatcctatataaatttcagaatatgtggaactgaaataatttttatctcagaagcaagtactcctattaaggcttggtgtgttttcatcattttaattttgactagaatagagaactcattagagtaggaaacgcacttctgccccagattcaggagaatgaggacttatttcagtgtctcaaacacaaactttcgaatgtagcctgcagaactctggtacttatgagccacattttgcctggctgttagttctcttgataacctaggaaatatgccttaccttagcttttcctaactgaatctctcttctctgcactaagacttttcccctagcttaatcatagtgtgtcttcctacaggaagccttttcaggttgacctgtacccatctaccagtcctcaagtagtttctcaaactggagtctctagatattctcaggagtctgagaattctctgagatataaacagttttgtggttctctgtgtagatgcaaacaccatacatctggtgtctactggagggtggagttgaaaatgatcattgtgaaacaatgccagaatctttctgaaacttttgcaagcagcaaatttgaacagctggtttgtaactgaggtttttaaacttcattcagtctaactgtatgaagtgccttacgtggctgttatggtagctgagaggaaggatgaactggagactgaggacaccacccccattttaacctggttggccctacttttatttgtattatatattgtggctcagtgaagatttctcttgggagcttctctccatctaaaagttttgaaaaccactggactaacaggtttatggcttgtggttttggtaggggaatagggaaaagtagcaatgtatccttataaagaggctgtatgtggctaagttatttgtaaatagatttttcatagttaaccaaacaaagagtccttagaaatttttactgctaattgggaatgttattccagggttatcttagattggtagatagtagttctcaagtttttcggtctcagaaccccctcacagtctttatttatttatttatttatttatttgagacggagtcttgctctgtcgtccaggctggagtgcagtggtacagtctcggctcactgcagcctgcgcctcccagcctcccgggttcaagcagttctctgcctcagcctcctgagtagctgggattacaggctctcgccaccacacctggctaatttttgtatatttagtagagacggggtttcaccatcttggtcaggctggtcttgaactcctgacctcgtgatccacctgcctcggcctcccaaagagctgggattacaggcgtgagctactgcacccggcccccttcacactcttaaaaaattatcgaggctccccaaaagtactgtttgtat

SEQ ID NO: 678 - DNA, 5165 bp, Homo sapiens
attacattcacaatgttgtgcaacgattactaccatctattctttcccaatccctagtaacttctaatctactttctgtctctaccaatttacctcttctagatatttaatgtaagtggaataataaaatatttgtatttttgtgtctgactactttcatttagtataatattttcaaggttcatctgtgttgcagtatgtaccagaatttcattcctttttaatgctcagtaatactctattcaggtggacattttgcaccttttggctaaactggatactgcagtgaacattggcatacaattattggtttaagtccctatttgcaattcatctgggtatgttccttggaatggaattgctgggttgtttttgtaattcgctgtggttagcttcttcaggaactgccatattgtttttcacagaacctgcaatattttacattcctaccagcaatgtacacatgtcaatttctctacctccttgcccacacttgctattttctttcttttcttatcccatcttagttggtgtccttttggtttgtatttctctaaccagtaatgatattaagcatcttttcatgtgcttattggccatttgtatgtctttatagaaatgtctattcaaattcattgcccctttttaaattagttatttatttatttatttgagatgaagtcttgctgttgtcccccaggctggagtgtgatggtgtgatctaggctcactgcaacctctgcctcctgggttcaagcaattctcctgcctcggccccatgagtagctgggattacaggcacctaccaccatgcctggctaatttttaggtttttaatagagacggggtttcaccatgttggccaggctggtctagaactcctgacctcaggtgatccacccccgcctcggctttccaaagtgctgggattacaggcgtgagccactgcgcctggaccattgcccattttttaatttggttgtttgtgtttttgatgttgagttttaggagatccttattatatattcttgatattagacctttatccaatatatgatttgcaaatattttctctcatttaaacccaatcaaaagtttatctttttagtttcttgataatgtcctctgatgaacgaaagtttttaattttgacgaagtcagatttatctgttttttctttcattgtcttgtgctttttgtgtcagatcttaagaattcattgccaaatccaaggtcatgaggatttgcccctatgttttcttctaagagatttatggttttagctcttatatttaggtcattgatatattttcagttaatttttgtgtttggtatgagttaggagtccaacgtcattcttttgcttgtggaaatccagttgtcccagcaccatttgttgagcagggtcttatttctccattgaatggacttggcacaaatcagttggtcatagatgtatcagtttattttggtatgctcagttttatgctgttggtctatatgtctatgctttttcagtaccatattattttgattactgtagcattgtagtaagttctgaagtcagaaagtgtgagtgttccaacttttttttttcttgattgttttggcttttcagtgtcccttgcagctctgtgaatttgagggtcagcatttccgtttctgcaagaaaagattttggaattttgatagagattgcatcgaatctgtacattgctctaggtagtattgatgtcaacaatattaagtcttcctactcaataactcagaatggcttttaatttattttggttattttaaattttctgcagcagcgtattgtagttttcagggtaaaactcacctccttggttaaatctctttctaggtactcttttagatgttattgttcttttcaatgttaaatggaattgcattcctaatttctttttcagattattcattgcatatgcatagaaacacaactacttaaattttttttttaagttatttatttttttgagacagggtctcgccctgtcacccagactggagtgcagtggcgtgatcacagctaactgtagcctcaacttcctgggctccagcaatcttcccatctcagcctcctgagtagttgggactacaggtgcatgccaccacaccacacatcacactggctaatttttgtatttttggtaagacagggttttgccttgttggccaggatggtcttgaactcctctgctcaagtgatccaccagcctcagcctcccaaagtgctgggattatgggcgtgagctaccatgcccggccgcaccagtctttcttttccagaatctatataacctgatcttctggacttcaaaatccttgttgtttcccctcacctataacccttttaaaacgaagcggaattcttctttttttttttttttttttttttttgagatggagtcttgctctgttgcccaggctggagtgcagtagtatgatcacggctctctacagccttggcctcctgggttttagtgatcctcctacctcaacctagtctagctgagtagctaggactacaagtgtgtaccaccacacccacctaattttttttcccctttggtaaagatgaactctcattatgttgcccacactggtcttgaactcgtaggctcaagctatcctcctgccttagcctcccaaagtgctgggtttacaggtatgagctaccacaccgggacaaagtggcacttttttttttttttttttttttttttgagacagagtctcgcactgtcacccgggctggaatgcaatggcatgatctcagctcactgcaacctctgcctcccaggttcaagtgattctcctgcctcagcctcccgagtagctgggattatggggcctgccaccacgcctggctaatttttgcatttttagtagagatggggtttctccatgttggtcaggctggtctcgaactcctgacctagtgatccgcccacctcagcctcccaaagtgctgggattacaggcatgagccactgagcctggcctaaagtagtactttttaattaaaaaaagaatcaaaatgaaactcaatacataggcaggtcataaaaaatgattttttcttttgctcaagcagtgagtagcattaagctgttccctcaccttcacctggtgttacctggagtacatttgggaagtcctcaactttgaaaaccctttttccctatatactgctggtaattaaaagcaaaaaattattctgaagtttgtcaagcattttatggaggagacattgctagtttgttttctgtttttttttaagtatattttaaacatttccttatactcctaatataaatgttgctttgtcagaaatttcaacatttggaacaaaatttttatagtttctaaataaatataattcaaaccaggtatagttaggatgggtgcctataatgctgtcaggatacatataatgctatgcataaagtttatttctgtatcatctagttgttcaacagttgatctaggcataataatgaaactacttttgcagtttgatatagtttggatatttgacccctccaaatttcatgttgaaatttgtccacctccaatctcacgtctcagtgttagacagtgggggcctggtgggaagtgttcggggtcatggggcaggtccctcatgaatgggttggtaccatccttgtcccagaggtaatgtgtgaattcctgctctattcgttcatgtgagaattggttgttcagaagagtgtgacacacttcccctctctcttgccatgtgacacatttgctccccctttggctctgccatgattggaaacctcctgaggtccttaccagaagcagatgctagcggcacgcttcttgtacagcctgcagaactgttagccaagtaaaactctttactttataaattacccagcctcaggtatttctttatagcaatgcaaatagactaaaagacagttaaacacatttttgtttttgtttttctccatgtctccttgctgtattttattatttttttgagacaaggtctcactctgttgcccaagctggagtgcagtggtgcagtctcggctcactgcaacctccccctcctgggcttaagtgatcctccctcctcagcctctcaagtagctaggactaaaggtgtgtaccaccacacccagctatttttctttaaattttttgtagagacagggtctcactgtgttgcctaggctggtcttgaactcttagtctcaaggaatcctcctgccttggcttcccaaactgcttggatcacaggtatgagtcaccacgcctggcctgctcttttgtttctatatgttagactttttgcagatttccatatataagcgatgtcatcagtattttctttcagtgtctggcttattttactgagtgtaatgtcctctgggtttattatccgtgtagttgcaaatggcagtatctcattttttaaggctgaatgatattccattgtgtgtatctgtgtgtatcacaatttcttttttcattcatctgtcagttgacacattgtttccataacttggctattgtgactaatactgcaatgaacacagtagcacagatatctctaccaggtgctgatttcatttcctttgagtacatacccagctaggtcatatggtagttctatttttaagtttttgaggaacctccattactgttttccataatggctgtgccaatttatattcccatccacagtctacaagggtttccttttctccacaccctcaccaacacttgttatctcttaccaaaagagtcattctaacaggtgtgagatgatatctcattgtggttttgatttgcatttctctgatgattaatgatgttgagtaccttttcatatacctgtttgtcattagtatgtcttcttcagaaaaaaacagtcttggccgggcacagtggctcatgcctgtaatcccagcactttgggagggcgaggcaggtggatcacttgaggtcaggagtttgagaccagcctggccaaaatggggaaaccccatctctactaaaaattagcagggcccgtaatcccggctactccagaggctgaggcaggagcatcacttgaactggggaggtggaggttgcagtgagtcgagatcgtgccacttcac

SEQ ID NO: 679 - DNA, 1408 bp, Homo sapiens
ttccaaggatttgtggtagcttggaggccaagaggaactcagcatttttggagttctgagtagctgaagtctggagtgggggccagatcgtgtgaatcaaattattgcattttatcttgtcagcagtggggagcaactgcagggttttaagcagggaactgacacacatgaattttgaaggactgctgtagactgtatggagcatggattaaatgggaactgaactgtaggcaggaaagccagttgaggagattttgcagtagttcatggaagggatgataggtggctttgattagagcagtagctgtggggatggagaaaagtggacaaattaattagagagatttagaggcagattggtgattgaattgagcagggcagtgagaggattcccaggtttctgactgaggtgtctaagtggggatggtgatgaaagggggaatattgggagaggatcacgtttggagggagactaaggcaccatcagtattctagagattagagggctgtgagagaattgtgataggagggatttactctttggcagatatccaagcgtggaaggcctgtttgatggactgtccttgataatcacaggcaggtatagcctcaaggctttgaggatggctctaaagtacatttcaaacaccacctcctccacaaagcctttctactacaactccatcccctgagtagagtgaatctcttcatattcttagtacctacagaattttggaatagtcatgtttagtatattttgttttagcaaatagggaagcaaatactatattttagaaatagttaatgtaaaatggctaggttttttttttttttttttctttttagtgtgatgcttcaaggggagcctttgtcattgtattagtccaggacctcttagaagcagatgccaagatgggattaagcacataagaaatttgttaggtgaaatgcttgtgaggggggaaaaggaaggagacagggagagttgtcagactgatgaaagtctgactccaagttaaaagagaggtaaggaaggaaggaactttgagtgaaagtgtcttagactgtagtgcaatactaaggaaagtttgcaaggcctcagaaagtctttgagtgaaaggtgcctgttggaaaaatgatgtgtctcccgggaacaggcctgccatgctcagtcagtgactgggaggagctagtgagaaactggcctcgacacaaacacagtgatggatttgagtgcagctgctgcagcactcagtctattatccttcctgtagtcagagatctgagaggctcgttctcatgatcaattagggtcatctctggctatgaattgcctaattcgggataaagtacagtttttccccatttcaggtgggtaatttgttcccaaaaaacccctgtatttaaa

SEQ ID NO: 680 - DNA, 175 bp, Homo sapiens
ctcatttcttaacaaatagattagatattgtgttaaataatcttaatttagtgaagacctaccagaatatatttgttgagtgtgaaaattatctctgaacagaactgcttatatacttggcaatggcattgtaatcagaaagactcaacacctttatgtcggactctgaccctct

SEQ ID NO: 681 - DNA, 356 bp, Homo sapiens
ataccctttagccatcatcctccaaacctccagccccaggtaaccattaatctattttctgtctttatggatttgtctgttctggacatttcatataaatggactcataatatgtagtctttcatgactgccttttttcacttagcaaaatgttttcaaggttcatccatattttagcatgtatcagtacttcatttctacgactaaatagtattgtgttgcattgatgtatactacattttgcttatacattcatcaatagatgaacatttgggttgtttctacctattggctattaagaatagctgcatattttcattcccactagcagtgtggaaggctttcagtttctatat

SEQ ID NO: 682 - DNA, 345 bp, Homo sapiens
cagatgttttgtttttttttttgtttttttttttgagacggagtctcgctctgtcgcccaggctggagtgcagtggcgggatctcggctcactgcaagctccgcctcccgggttcacgccattctcctgcctcagcctcccaagtagctgggacgacaggcgcccgccactacgcccggctaatttttttgtatttttagtagagacggggtttcaccgttttagccgggatggtctcgatctcctgacctcgtgatccgcccgcctcggcctcccaaagtgctgggattacaggcgtgagccaccgcgcccggccactcagatgttatttaagaaagttttttt

SEQ ID NO: 683 - DNA, 570 bp, Homo sapiens
atttcctgcatgaagaattggtatcttcaggatgctgtagcttttatcttgtataattgccttaaaatttgcatctctgccctcagaatgaatccagtttgactgggttggtaaaccaaagacaactgcagtgctcagggggatgggtttgggtgtacatgtgggagtggacgccttagagaagtgttgaggttccaagcccttttcctctggcatgtaaatatctctgacttcccctccctctcccgctcctggtgatttgaggcaaaacccccagtccccagctctccaggcagaaggggctgggggcctgcctgtctcctttgggaaacttcctctctcctactaaaccctcaggccctttcctaagtagatacaaatcattgagtttttccgtttctagtttgttaactttgatttgcatgataccatttggatcaaagcactgaaagaaaaattaaccaagctccctagtattttcacgttcttatttactttttccctgttcattcaaactcaaaggcagctaaggtgaaagagatgagagagatcctgaagcagggatgaggg

SEQ ID NO: 684 - DNA, 570 bp, Homo sapiens; identical to SEQ ID NO: 683

SEQ ID NO: 685 - DNA, 5966 bp, Homo sapiens
attccagcactttgggaggccgaggcaggcagatcacgaggtcaggagatcgagaccatcctggctaacacggtgaaaccccgtgtctactaaaaatacaaaaaattagctgggtgtggtggcacacgcctgtagtcccaggtactcgggaggctgaggcaggaggattgcttgaacccaggaggcagaagctgcagtgagccaagatagtgccactgcactccagcctgggcaacagagcgagactccgtctcaaaaaaaacaacaacaaaaaagaaaatggggactaagacacagaagaatatagctgtggggagtagcttcagggaactgaaataggtccagaggaagctcgaagtggccattctgaagtttatgcaaactgctggccaggagaggcgaaaaaaaaaaaaatagagaagggacatgacagtggggaaggggagataggaggggatttgttactctcactcgaggctgcaagttgcctctccacaattaatctcaccttttagtagagaacccaaattttcaggcctggcgcggtagctcacacctgcaatcccagcactttgggaggccgaggcaggtggatcacttgaggtcatgagctcaagaccagcttggccaacatggcgaaaccctgtctctactaaaatacaaaaattggccgggtgtggtggcgcatgctataatcccagctactcaggaggccaaggcaggagaattgcttgaacccaggaggcggaggttgcagtcagctgagattatgccactgcactccagcctgggtgacagagcaaggctcagtctaaaaagaaaaaaaaaaaatttagatgggcttaatgcttcccagtaagactgcgtgtcctaacctccctggcagctaagtgtgaccttgaagctaagtattaactaaggacttttaggaggtttctttaaagggaggtggaatagggctgggcctctttgtctggctacttagaaataaaatcaagggtgagaggtaaaatgggtaataggaggcagcgtccttcccccacgcaccacaaccctgtgctggagctcccaagagcacatggcatagcagtgcattctgccattccgctgtgtaccaccctctgtcctgtcttccctttccctttctcttcagttcttcattctgtttccttttatttcttttccttcttgtgtgtctttacctaccctgcataaaaatgctggttaggacctttgggttcctcattctggttacctgttggagtgagtctgtatcctgagaaattcatggagatcaccatgattagaagtcatggctgctgagccaagcatcatagacttgaggcctagcagcttccaggggctccaggaccatcaggtgggaaggccctgggggggtccaggacagctccagcctagctccacaggggcagaagtgtaccagtgcctacttgctgctccaccacaggctaggccacttgtctcccaccacgtctctgggtttacgcgtccctcgacttttgctgcccataccaaaggctcagttctgagcctcaagttccatttcctctcacgagaggatgtgacgctctcattcagccactctgccctgtttgggagctttttcccacagtcaagccggtctattgcccatccttggatcatgtggtaggagctgatgttttaccacccgcctctgtccatcttcttgtggttacagtgccctggttttccacaggaaagccatgcctccctcacccttattttgtatggtccaaatagtctcatatgatccaccatcctcagtgtctagtaatgcagagatgggtccactccccaatccaagccaatgagatgcttaagaaaggcgcacttcctttatccctgaacttggttgtagtgatgttaaccagggtccagcagtcatgctgtcagcaccagagacaacctacctacagatgcagccaatgtggagggacaggagccaataggtgaaagagaggtggggcctctgtggcactgtttgagcctccacagccagctaggcattaccgctaggtaagtcaataggcctcttttctttgctcaaatcaggttaagagggttttccatcacctgtaactgaaaatgtcctaactggtccaggtcaggtggccaccctggtccaatcagcagtggctggagtagcaggccagatgtcacttgcagaacaaagtgtgctcaagtcagcccttgaaatggggctgtgggacgggcagtgtgaagctgagtctttccactataaataaggctgtgcaaggccaagttaatagatgtttggagttcataaatcatggtggctgtggttatcaaattaaaaaaaaaaaatcaaaccaaaaccaccagtagcctcaaaaagcacatgattggaaatgtgagaggctgtcaggagccctggcccgtggcgaaccttgctggaagtgctgtgaccatgtgtgtgtttgaacctggacaaaccactgatgtagacatctccccagatccattcctcaaaactccctgaagtgattagatattgaatcccatgcctaagacagagtagcagtgtctgtttgctgaatgagattcttcccccaaatatgagtttggatttgtgtccttgcccccatctcagttcaaattgtaatcccagtgttggaggaggggcttggtgggaggtgattagatcattgggggcggacttccctcttgctgttgttgtgatagtgagtgagttctcatgagatctggttgtttaaaagtgtgcagcacctcccccttctctctgtcttcctcctctggccacgtaagacggggcagcttccccttcaccttccatcatgattgttaagtttccagaggcctccccagccatgcttcctgtacagcctgtggaactgtgaatcagttaaagcctcttttctttataaattacccaggttcaggtagttctttatagcaatgcaagaacaggctaatacaccacccttctcaaagactgccacttctatattctgtattttaggagtcagcactatttgaggaattgaaatgaaacctaaggtaaaataaagctagcaaacaaaggagagatttgtgtagacagcctagacaagtttacattccgcattaaacacttggatttatttaacagtttcatttatgactttacagttgtttaataaatattacggcattccagctaggaagatagtatcacccctttaaacatgagaaaatcaaatgaatggcttaaggcaaaaaattcttttattagtacccaaaagtgtagactttgttattactttaaatttagaaaagtacattttcaatagttagtggctagcaaaactggtattattcatctttttctttttttttttttttttgagacggagtcacgctctgtcgcccaggctggagtgtggtggcgccatcttggctcactgcaagctccgcctcctgggttcataccattctcctgcttcagcctcccgagtagctgggactacaggcgcccaccaccacgcccggctaatttttttgtatttttagtagagacggggtttcaccatgttagccaggatggtctcaatctcctgacctcgtgatccacccacctcggactcccaaagtgctgggattacaggcgtgagccaccacacccagccccaaaactgatatttttgtgtgaactaataaataatttagttaggtttatttagaaaataaactttaaggatttagggatttgcaaacttcagtttgaaataggtttagacagctaaagatctttggattttgtaaagagaaaattaattgaagaaagaatttaaggtaaatatgatttatgactattctgttttagatgtgaagcggtaaacaatattgggccacagattgggagtagagtgggggaaggaagacaggaagacagcagtgaggtaaaggagagtttgtaagtcattcataaccaacactacccatttagcatgatagttatgaatataccaaggccttttagaccactctgaaatgcacattgaccctctcttttaaatcatgaatttctgtttttttgtttgtttgtttgttctttgttttagctggaatctgcctctgtcacccaggctggagtgcagtggcgcaatctcagctcactgcaacctccaccctcccaggttcaagcagttctcctgcctttgcctcccgagtagctgggagtacaggtgcccgccaccacgcctggctaatttttgtatttttgatagagacgcatttcaccatgtttcccacgctcccctcaaactcccgacctcaggtgatccacccgccttggcttcccacagtgctgggattacaggcatgacccaccacacctgacctaaatcatgaatttctcccttaatttgtgcaaaatttagtgtacctggatttccttctgtgttcttctctatccttaagatttttcagttcagaaatattcttgtttgggatagatattaaaagatgaaactggaagccaggcgcggtggctcatgcctgtaatcccagcactttgggaggctgaggcaggcggatcatctgagttcaggagtttgagaccagcctggccaacatggggaaaccctgtctctacgaaaaatacaaaattagccaggcatgttggcgcatgcctgtaatcccagctactttggaggctgaggcaggagagtcccttgaacccgggaggcggaggttgcaatgagctgagattacgccattgtactccagcctgggtaacgagagcgaaactccatctaaaaaaaaaaaaaaagacaaaactggtaattgggaggatgaaaaggaagtaaaacaggagtaagaactttgcattgcggccccagggggttgtggtggagggaaggaagcggaagcaggtacctgagaccataggactgtacttccatgggacatgtatgatccaggtggatacaagccaggtcttgatgcactgctgtgtttaaggtgtgctgtgagctaagcctctgcagcatagtttatgctcgtcctacccccttgtaaaaattatcttttcaactcgcccattgtcacctctatccttcattcagcctttgcttatgctactcctccacttggaacacgctttccccaatctttgcctagtcattcatcctgttagatctgcctgcatctctgccaagaatccccttaacttggcctttttcaggagtgagtttgaggagaaagcttaggaaataataagccaaatttttgtgtcttaaacatccagttaactctggatagtgacagccaacaacatggagtcataaaagcaaaggtaaaaacttgaataagcaacaagacattgaagaaaatatctcgacatgatcagcaacaggcaacatcagtttcttagcatctcttaaagactgatagaggagagacaatttcttttctagcaaacaagagatggtgaatggaaattagcctcttctaatgtaagctgtgtagactaaacactgtaagagcctaatgttcagcgtgcacatggtcatgaatccagcttttagtacaatgccaagcacagtgtgaactcagtacatatttgttgcattaataaatattagtcctatttgctgttggattaaaagcaagtatagaagtcaggcgctgtggctcatgcctataatcctagcactttgggaggctgaggctagtggatcacctaaggtcaggagttccagaccagcctggccaacatggtgaaatcccgtctctactaaaaatacaaaaaattagctgggcatggtggcaggtgcctgtaatctcagctacttgggaggctgaggcaggagaatcacttgaacccgggaggcggaggttgcagtgagccgagatcacaccattgcactccagcctggacaacaagagcgaaactctgtctc

SEQ ID NO: 686 - DNA, 5932 bp, Homo sapiens
cgaggtcaggagatcgagaccatcctggctaacacggtgaaaccccgtgtctactaaaaatacaaaaaattagctgggtgtggtggcacacgcctgtagtcccaggtactcgggaggctgaggcaggagaattgcttgaacccaggaggcagaagctgcagtgagccaagatagtgccactgcactccagcctgggcaacagagcgagactccgtctcaaaaaaaacaacaacaaaaaagaaaatggggactaagacacagaagaatatagctgtggggagtagcttcagggaactgaaataggtccagaggaagctcgaagtggccattctgaagtttatgcaaactgctggccaggagaggcgaaaaaaaaaaaaatagagaagggacatgacagtggggaaggggagataggaggggatttgttactctcactcgaggctgcaagttgcctctccacaattaatctcaccttttagtagagaacccaaattttcaggcctggcgcggtagctcacacctgcaatcccagcactttgggaggccgaggcaggtggatcacttgaggtcatgagctcaagaccagcttggccaacatggcgaaaccctgtctctactaaaatacaaaaattggccgggtgtggtggcgcatgcctataatcccagctactcaggaggccaaggcaggagaattgcttgaacccaggaggcggaggttgcagtcagctgagattatgccactgcactccagcctgggtgacagagcaaggctcagtctaaaaagaaaaaaaaaaaatttagatgggcttaatgcttcccagtaagactgcgtgtcctaacctccctggcagctaagtgtgaccttgaagctaagtattaactaaggacttttaggaggtttctttaaagggaggtggaatagggctgggcctctttgtctggctacttagaaataaaatcaagggtgagaggtaaaatgggtaataggaggcagcgtccttcccccacgcaccacaaccctgtgctggagctcccaagagcacatggcatagcagtgcattctgccattccgctgtgtaccaccctctgtcctgtcttccctttccctttctcttcagttcttcattctgtttccttttatttcttttccttcttgtgtgtctttacctaccctgcataaaaatgctggttaggacctttgggttcctcattctggttacctgttggagtgagtctgtatcctgagaaattcatggagatcaccatgattagaagtcatggctgctgagccaagcatcatagacttgaggcctagcagcttccaggggctccaggaccatcaggtgggaaggccctgggggggtccaggacagctccagcctagctccacaggggcagaagtgtaccagtgcctacttgctgctccaccacaggctaggccacttgtctcccaccacgtctctgggtttacgcgtccctcgacttttgctgcccataccaaaggctcagttctgagcctcaagttccatttcctctcacgagaggatgtgacgctctcattcagccactctgccctgtttgggagctttttcccacagtcaagccggtctattgcccatccttggatcatgtggtaggagctgatgtttttaccacccgcctctgtccatcttcttgtggttacagtgccctggttttccacaggaaagccatgcctccctcacccttattttgtatggtccaaatagtctcatatggatccaccatcctcagtgtctagtaatgcagagatgggtccactccccaatccaagccaatgagatgcttaagaaaggcgcacttcctttatccctgaacttggttgtagtgatgttaaccagggtccagcagtcatgctgtcagcaccagagacaacctacctacagatgcagccaatgtggagggacaggagccaataggtgaaagagaggtggggcctctgtggcactgtttgagcctccacagccagctaggcattaccgctaggtaagtcaataggcctcttttctttgctcaaatcaggttaagagggttttccatcacctgtaactgaaaatgtcctaactggtccaggtcaggtggccaccctggtccaatcagcagtggctggagtagcaggccagatgtcacttgcagaacaaagtgtgctcaagtcagcccttgaaatggggctgtgggacgggcagtgtgaagctgagtctttccactataaataaggctgtgcaaggccaagttaatagatgtttggagttcataaatcatggtggctgtggttatcaaattaaaaaaaaaaaatcaaaccaaaaccaccagtagcctcaaaaagcacatgattggaaatgtgagaggctgtcaggagccctggcccgtgggcaaccttgctggaagtgctgtgaccatgtgtgtgtttgaacctggacaaaccactgatgtagacatctccccagatccattcctcaaaactccctgaagtgattagatattgaatcccatgcctaagacagagtagcagtgtctgtttgctgaatgagattcttcccccaaatatggtttggatttgtgtccttgcccccatctcagttcaaattgtaatcccagtgttggaggaggggcttggtgggaggtgattagatcatgggggcggacttccctcttgctgttgttgtgatagtgagtgagttctcatgagatctggttgtttaaaagtgtgcagcacctcccccttctctctgtcttcctcctctggccacgtaagacggggccagcttccccttcaccttccatcatgattgttaagtttccagaggcctccccagccatgcttcctgtacagcctgtggaactgtgaatcagttaaagcctcttttctttataaattacccaggttcaggtagttctttatagcaatgcaagaacaggctaatacaccacccttctcaaagactgccacttctatattctgtattttaggagtcagcactatttgaggaattgaaatgaaacctaaggtaaaataaagctagcaaacaaaggagagatttgtgtagacagcctagacaagtttacattccgcattaaacacttggatttatttaacagtttcatttatgactttacagttgtttaataaatattacggcattccagctaggaagatagtatcacccctttaaacatgagaaaatcaaatgaatggcttaaggcaaaaaattcttttattagtacccaaaagtgtagactttgttattactttaaatttagaaaagtaaattttcaatagttagtggctagcaaaactggtattttttttctttttcttttttttttttttttttgagacggagtcacgctctgtcgcccaggctggagtgtggtggcgccatcttggctcactgcaagctccgcctcctgggttcataccattctcctgcttcagcctcccgagtagctgggactacaggcgcccaccaccacgcccggctaatttttttgtatttttagtagagacggggtttcaccatgttagccaggatggtctcaatctcctgacctcgtgatccacccacctcggactcccaaagtgctgggattacaggcgtgagccaccacacccagccccaaaactgatatttttgtgtgaactaataaataatttagttaggtttatttagaaaataaactttaaggatttagggatttgcaaacttcagtttgaaataggtttagacagctaaagatctttggattttgtaaagagaaaattaattgaagaaagaatttaaggtaaatatgatttatgactattctgttttagatgtgaagcggtaaacaatattgggccacagattgggagtagagtgggggaaggaagacaggaagacagcagtgaggtaaaggagagtttgtaagtcattcataaccaacactacccatttagcatgatagttatgaatataccaaggccttttagaccactctgaaatgcacattgaccctctcttctaaatcatgaatctctgttgttttgtttgtttgtttggtctctgtcttagctggaatctgcctctgtcacccaggctggagtgcagtggcgcaatctcggctcactgcaacctccacctcccaggttcaagcagttctcctgcctttgcctcccgagtagctgggagtacaggtgcccgccaccacgcctggctaatttttgtatttttgatagagacgcatttcaccatgttggccaggctggtctcaaactcccgacctcaggtgatccacacgccttggcttcccacagtgctgggattacaggcatgacccaccacacctgacctaaatcatgaatttctcccttaatttgtgcaaaatttagtgtacctggatttccttctgtgttcttctctatccttaagatttttcagttcagaaatattcttgtttgggatagatattaaaagatgaaactggaagccaggcgcggtggctcatgcctgtaatcccagcactttgggaggctgaggcaggcggatcatctgagttcaggagtttgagaccagcctggccaacatggggaaaccctgtctctacgaaaaatacaaaattagccaggcatgttggcgcatgcctgtaatcccagctactttggaggctgaggcaggagagtcccttgaacccgggaggcggaggttgcaatgagctgagattacgccattgtactccagcctgggtaacgagagcgaaactccatctaaaaaaaaaaaaaaagacaaaactggtaattgggaggatgaaaaggaagtaaaacaggagtaagaactttgcattgcggccccagggggttgtggtggagggaaggaagcggaagcaggtacctgagaccataggactgtacttccatgggacatgtatgatccaggtggatacaagccaggtcttgatgcactgctgtgtttaaggtgtgctgtgagctaagcctctgcagcatagtttatgctcgtcctacccccttgtaaaaattatcttttcaactcgcccattgtcacctctatccttcattcagcctttgcttatgctactcctccacttggaacacgctttccccaatctttgcctagtcattcatcctgttagatctgcctgcatctctgccaagaatccccttaacttggcctttttcaggagtgagtttgaggagaaagcttaggaaataataagccaaatttttgtgtcttaaacatccagttaactctggatagtgacagccaacaacatggagtcataaaagcaaaggtaaaaacttgaataagcaacaagacattgaagaaaatatctcgacatgatcagcaacaggcaacatcagtttcttagcatctcttaaagactgatagaggagagacaatttcttttctagcaaacaagagatggtgaatggaaattagcctcttctaatgtaagctgtgtagactaaacactgtaagagcctaatgttcagcgtgcacatggtcatgaatccagcttttagtacaatgccaagcacagtgtgaactcagtacatatttgttgcattaataaatattagtcctatttgctgttggattaaaagcaagtatagaagtcaggcgctgtggctcatgcctataatcctagcactttgggaggctgaggctagtggatcacctaaggtcaggagttccagaccagcctggccaacatggtgaaatcccgtctctactaaaaatacaaaaaattagctgggcatggtggcaggtgcctgtaatctcagctacttgggaggctgaggcaggagaatcacttgaacccgggaggcggaggttgcagtgagccgagatcacaccattgcactccagcctggacaacaagagcgaaactctgtctc

SEQ ID NO: 687 - DNA, 499 bp, Homo sapiens
gcacatccatgtaatagtaccgcggtgaggagcattcaggagtgattctgccgtaatgcttaggtgtgtatctgatttatggaagataggctgtaggctgtataacccgtgtacatatatgttaggggccgaattatgtctccccccaaaaagatagttggaagtcctaacgctgagtaccacagactgtgaccttatttagaaacaaggtcattgcagatgaaattagttaaaatgagatcctgctaaagtagcatgggccccttatccaatactactggtgtccttatgtgaagacagacacacagaaagccatgtgatgatgaaggcagagattggagggatgcagcaaaaattgccaaagattttcagcaaactagcagaagctaagaagagacttcttccccttcagaaggaaggagcatggccttagtaacaccgcgattttggacttctatccccagaatcgtgagaaataaattcgtgttgttttaagcca

SEQ ID NO: 688 - DNA, 314 bp, Homo sapiens
agaatacaaaaatggcacaaagcaaggaagtaaggcaggaagggttttatgtaggttgtgactatatgatatgaatctcaaaagttatattttacagagtaaagaagtagggagctggaataattctaggcaggagggattcattttagcagtcagtgaattgtgatactatagttgggaagtacagtgatgtgctgaaatgtagggcatagtcagtggctagtatgagatgatgctgaaggagagatggacaggggtcactccttggccttctatgccaccccaaggatttgggccatggggaagaaaaaggg

SEQ ID NO: 689 - DNA, 314 bp, Homo sapiens; identical to SEQ ID NO: 688

SEQ ID NO: 690 - DNA, 499 bp, Homo sapiens; identical to SEQ ID NO: 687

SEQ ID NO: 691 - DNA, 509 bp, Homo sapiens
atttaaagggtagaaaaatatcaacaataatcaacatcaaacaagaatcttggagatactagagcacagccaagttgtcagtaaatatgaaaatagatgatcagaatgatataattaaagttaaactcaacgaatcaatatggtttgacaggaagatgggttgacatacaaaacaattttgaattaatatatttctaatggtggatgtatttcttgaagctggggcacatttctaggcattgaaaggattctttcatgaaaaacaatgttcatttcactttataatcctgaaatgataattttaggatttactgtttttgctcatgtaaatattttagaaatagagaaattggctaatttatatgagaaaattttagtatgttatttattattaatattagaaggcttatatattattattaatgtttgcaagcatcattttacagctgctttctcgggaatattatcttttacatcaattgaattaaagaactaaaaatctctttaaa

SEQ ID NO: 692 - DNA, 509 bp, Homo sapiens; identical to SEQ ID NO: 691

SEQ ID NO: 693 - DNA, 705 bp, Homo sapiens
gcactggtgaggcagagagcaaagtgatgaacaggacatgtagaaaatggagacctggagagtaagaagagaaaggacaatgagactcaaacatacagaaggacaggggcatgcactgacaaaaacatcagaccctcctccaagagccacgtctccaatgacagcagcaacagaacgacctcagacaggctgtgggtggaggtgggaaacaggtccatcttaccttgcaaggggacagggcttgagtaaagaatagaagatggaaaattaactccgtacagaacacacgttggaaacgagcagcggagagaatgcctaaatccagaaaagtgcaaagaggccaggggacatcatcagacacagaactggaccttggctctgctggggatctgcattcactctgcccagaacaattccaccactcagctaagggcccgttctcaatgtattctgggtgttagcagcaaatcttgggctctaatattctgaatgaaaatgttttcaaagctactcggcccacagtcaatctaccgaggctgcctttttgataggaggtaaaggcattattactgctctcatctcttggtcttagaacctagcataactgaagacttgaagaatgaatagccacgaagcatatgggacacagctgaaaactctatggctgcctctaaactctttaatacccaaaggtttctttctctc

SEQ ID NO: 694 - DNA, 3866 bp, Homo sapiens
acatttatttattttcgtatattgaaccagccttgcatcccagtgatgaagaccacttgatcatggtggataagctttttgatatgctgctagattcggtttgccagtattttattgaggatttttgcatcgatgttcatcaagaacgttggtctaaaattctcttttttggttgtgtctccgccaggctttggtatcaggatgatgctggcctcataaaatgagttagggaggattccctctttttctattgattagagtagtttcagaaggaatggtaccagttcctccttgtacctctggtagaattcggctgtgaatccatctggtcctggactctttatggttggtaagctattgattattgccacaatttcagagcctgttattggtctattcagagattcaacttcttcctggtttagtcttgggagggtgtatgtgtcaaggaatttatccatttcttctagattttctagtttatttgcgtagaggtgtttgtagtattctctgatggtagtttgtatttctgtgggatcggtggtgatatcccccttatcattttttattgcgtctatttgattcctctctcttttcttctttattagtcttgctagcagtctatcaattttgttgatcctttcaaaaaaccagctcctggtttcattcattttttgaagggttttttgtgtctctatttccttcagttctgctctgattttagttatttcctgccttctgctagcttttgaatgtgtttgctcttgtttttctagttcttttaattgtgatgttagggtgtcaattttggatctttcctgctttctcttgtgggcatttagtgctataaatttccctctacacactgctttgaatgtgtcccagagattctggtatgttgtgtctttgttctcgttggtttcaaaaaacatctttatttctgccttcatttacttatgtacccagtagtcattcaggggcaggttgttcagtttccatgtagttgagcggttttgagtgagtttcttaatcctgagttctagtttgattgcactgtggtctgagagacagtttgttataatttctgttcttttactttagctgaggagagctttacttccaactatgtgttcaattttggaataggtgtggtgtggtgctgaaaaaaatgtatattctgttgatttggggtggagagttctgtagatgtctattaggtccacttggtgcagagctgagttcaattcctgggtatcgttgttaactttctgtctcattgatctgtctaatgttgacagtgaggtgttaaagtctcccattattattgtgtgggagtaagtctctttgtaggtccctcaggacttgctttatgaatctgggtgctcctgtattgggtgcatatatatttaggatagttagttcttcttgttgaattgatccctttaccattatgtaatggccttctttgtctgttttggtctttgttggtttaaagtctgttttatcagagactaggattgcaacccctgcctttttctgttttccatttgcttggtagatcttcctccatccttttattttgagcctatgtgtgtctctgcacatgagatgggtttcctgaatacagcacactgatgggtcttgactctttatccaatttgccagtctgtgtcttttaattggagcatttagtccatttacatttcaagttaatattgttatgtgtgaatttgatcctgtcattatgatgttagctggttattttgctcgttagttgatgcagtttcttcctagtctcgatggtctttacattttggcatgattttgccgcggctggtaccggttgttcctttccatgtttagtgcttccttcaggagatcttttagggcaggcctggtggtgacaaaatctctcagcatttgcttgtctgtaaagtatttcatttctccttcacttatgcagtttagtttgggtggatatgaaattctgggttgaaaattcttttctttaagaatgttgaatattggcccccactctcttctggcttgtagagtttctgccgagagatccgctgttagtctgatgggcttccctttgtgggtaacccgacctttctctctggctgcccttaacattttttccttcatttcaactttggtgaatctgacaattatgtgtcttggagttgctcttctcgaggagtatctttgaggcattctctgtatttcctgaatctgaatgttgtcctgccttgctagattggggaagttctcttggataatatcctgcagagtgttttccaacttagttccattctccccgtcactttcaggtacaccaatgagacgtagatttgatcttttcacatagtcccatatttcttggaggctttgttcatttctttttattcttttttctctaaacttcccttctcgcttcatttcattcatttcatcttccatcactgataccctttcttccagttgatcgcatcggctcctgaggcttctgcattcttcaagtagttctcgagccttggctttcagctccatcagctcctttaagcacttctctgtattggttattctagttatacattcatctaaatttttttcaaagtttttaacttctttgcctttggtttgaatttcctcctgtagctcggagtagtttgatcatctgaatccttcttctctcaactcgtcaaagtcattctccgtccagctttgttctgttgctggtgaggaactgcattcctttggaggaggagaggtgctctgctttttagagtttccagtttttctgctctgttttttccccatctttgtggttttatctactttttgtctttgatgatggtgatgtacagatgggtttttggtgtggatgtcctttctgtttgttagttttccttctaacagacaggaccctcagctgcaggtctgttggagtttgctagaggtccactccagaccctgtttgcctgggtatcagtggcggtggctgcagaacagtgggttttcatgaaccgcgaatgctgctgtctgatcgttcctctggaagttttgtctcagaggagtacccggccatgtgaggtgtcagtctgcccctgctggggtgcctcgcagttaggctgctcaggggtcaggggtcagggacccacttgaggaggcagtctgcccgttctcagatctccagctgcgtgccaggagaaccactgctctcttcaaagctgtcagacagggacattaaagtctgcagaggttactgctgtctttttgtttgtctgtgccctgcccccaaaggtggagcctacagaggcaggcaggcctccttgagctgtggtgggttccacccagttcgagcttcctggctgctttgtttacgtaagcaagcatgggccatggcaggcacccctcccccagcctcgctgccgccttgcagtttgatctcagactgctgtgctagcaatcagtgagactccgtgggcgtaggaccctctgagccatgtgcgggatataatctcgtggtgcgccgttttttaagcccgtcggaaaagcacagtattcgggtgggagtgacccgattttccaggtgccatctgtcacccctttctttgaataggaaagggaactccctgaccccttgcacttccagagtgaggcaatgcctcgccctgctttggctcgtgcatggtgcgctgcacgcactgtcgtgcgcccactgtgtggcactccatagtgagatgaacccggtacctcagatggaaatgcagaaatcacccgtcttctgcgtcgctcacgctgggagctgtagaccggagctgttccatttcggccatcttggctgccttccccaatttttt

SEQ ID NO: 695 - DNA, 2116 bp, Homo sapiens
ggttcttcaaagctgcacagcattcattgagagatatggcatcgtggatggaatctatcgcctttctggtgttgcctccaatatccagagactacggtaaaatcttatatggcactttttcactccttcttaactaattaaaatgcaaatattttaaaacagattcacttactttgataacctattttcattaaagataatttagataaaataggaaataatatacatgttattgtctctgtatacttttctaaatggcatttttttcatctgtagtatcagagaaccatgcaccttaatctcttcagtacttgtattttgcctctttatagtgtttgaagattttaacaaattgagtttgaaccgatgacagccatgagagaggaaatttgcattataataaaattattctttaggtgttaattaaaatggatgggaatggaacattttctaatctcctttgaccctgattctgtgtttatgttcaagtatgcatctctacatatttcacatcctccccaaatcttctctgagacaaaaacagtgacaaactctgtgcctgcaatattttatttttgcttaatctcttggattctagactattcttgacatgccattaccctttcttttttactgtagtacatgataactgccattattctgtagagattttaatactttaacagatcatagagcccatctcagttttgggaaatacatgcttgaaaaatacataaattagtccttgtactaaagacagtttcagtcttcagtttaagacaaagtaaatctcatattgtacacacacattaatcctctaggtagatgataagtggtctcatgcccgtggatgaatattaattaacctcctggagagtgagcttactctgccttactattctgcgtacaacttttattttactcattctaatgatacagattttcctgcctattaaaatttgttgttagctaggaattgctttatgttgtttctgacttttttatcctgcttcgggaaagcatttctgtgttgtacaatctgtatctgaggaatttctgctcataattgttcatagatcaattgccattcaacactagtctctggaattgccaaaatattggatattcaagtcattagcaattaggagtcctgttttcagactgttgtactataagagctgttcattcatatgtatctcagaggctattgtccattttaatattaaagctgtgcccttaatttccacatagaaagacatctatcttgtactaagacatccagttgttgctgaagtccaaacacaacttaaatgaaatataattaatggaagataatagcaactcactgagatagagctgaacacttttggagcttatgctttctgtttttaagacacatatttgctctcctcaatcaaatgatttgcttgtcctcttctgtctacgtcagccatgaatttgactctgagcacgtccccgacctgacgaaagaaccgtatgttcaggacatccattctgtgggttccctatgtaagctgtacttccgggaactcccaaaccctctgcttacctaccagctgtatgagaaattttctgtgagtacaggctacttttgaatctaattctttgtggaactttgctgtgcttttgttcaaaacacatgaactttggtttggtcacatgtaagaaatagttctgtgactgaaatgactccttaaaaaaacaaatattgccagctagtcggtggtctttgctgttttcacattgtcattcttgtgctttctgactttgagctgctagtcttgtcacacttaatactgatgaccatcaagcctttttaaaattagtttcgtagatctcagtgttcacactgtgtggaaacagtttacttcctgaatacaatgttgtgtttcctcgccatttcacatccaagagcaaagcaagttgatctcagagtgaaaactgaattgtaagtgaactttcatttttactaacagagctcactagtttattttgtactgtgactcttctaggatgcagtttcagcagcaacagatgaagaaaggctgataaaaatccacgatgtcatccagcagctccccccaccacactacag

SEQ ID NO: 696 - DNA, 369 bp, Homo sapiens
ggcacatatataccatggaatactatgcagccataaaaaaggatgagttcatgtcctttgcagggacatggatgaagttggaagccatcattctcagcaaactatcacaagaacagaaaaccaaacaccacatgttctcactcataagtgggagttgaacaatgagaacacatggaatagggaggggaacatcacacaccagggcctctcggggggttggggggctaggggagggataacattaggagaaatactcaatgtagatgatgggttgatgggtgcagcaaaccaccatggcatgtgtatacttacgtaacaaaactgcacattctgcacatgtaccccagaacttaaagtataataaaaaaa

SEQ ID NO: 697 - DNA, 731 bp, Homo sapiens
atgcctttctagctgtcattcctagccattgtttctacatgtccacagaccccatgcctccatcctgagccttttggacttatagagtttaggttaagcaatatactatgaataggcacatgggttacagagaacaagagaaaaggatattctcttaggaagagccaagagagaaatgggacacaacagcatgacacagcggtcaacacaggccttggatcagttgactaaccttgaaaggttccctgtgaaataagaagctccaggttaataccacattgcccctttaggccaataatgaattctgatcaattccacttaagaatcgttcattgtttctttgtcactgctctaacctcatggcaaatgctgagatatgtcttgaggtgatttatcacaagggtttctgaatcatgatatatcacattcattgcatccttcacttaccaggcacccatttccaaaatattacatatttatctccatttttaacactacagattaggtcaatggtgagtgcctttttttaaaagtccctactaattagcggtgatgagaaatagtgttgtttattttttaaccttcaagacgtagctattgtttcttcctcaatttcctagttcagtttggcaaactggaccactgaaagtccactaggcgtttatctagtgatttctctaagcatggctgggtgagagcaagttgaaaatgacgtctgtcagcagaaattc

SEQ ID NO: 698 - DNA, 731 bp, Homo sapiens
atgcctttctagctgtcattcctagccattgtttctacatgtccacagaccccatgcctccatcctgagccttttggacttatagagtttaggttaagcaatatactatgaataggcacatgggttacagagaacaagagaaaaggatattctcttaggaagagccaagagagaaatgggacacaacagcatgacacagcggtcaacacaggccttggatcagttgactaaccttgaaaggttccctgtgaaataagaagctccaggttaataccacattgcccctttaggccaataatgaattctgatcaattccacttaagaatcgttcattgtttctttgtcactgctctaacctcatggcaaatgctgagatatgtcttgaggtgatttatcacaagggtttctgaatcatgatatatcacattcattgcatccttcacttaccaggcacccatttccaaaatattacatatttatctccatttttaacactacagattaggtcaatggtgagtgcctttttttaaaagtccctactaattagcggtgatgagaaatagtgttgtttattttttaaccttcaagacatagctattgtttcttcctcaatttcctagttcagtttggcaaactggaccactgaaagtccactaggcgtttatctagtgatttctctaagcatggctgggtgagagcaagttgaaaatgacgtctgtcagcagaaattc

SEQ ID NO: 699 - DNA, 562 bp, Homo sapiens
attaatactagttcttgagctattgctgttactaataaaccattatacatttgcaatcagttacattgttttgtgggaatgaatttcatttatagaacaacatgcaaatgggtagcatgagttctaatagtaaatgtgccattttatgtaaggaagaaattggtatataatagtgtattaatccctaaaaggaaaccaaattaattacatagctaataaaaggaagtgcatacattgctataatcttcttcaatggcatattaaattttgccatatattttatattacacacatatttgtgtttgtagtgcaactagtttttgatggtctgttatttcatattccaaatctctgggtttcttccttctattgaaaatatagtaatatagttttttaccttcatgccattcagtaggtttgttttaagaaattaacactgattttcatgctaaattacaagaaatattttaagaagacaaatcgttcaataacaagttacaatataagtcagaaattaattctaattaaagtgagggaataaatttcaaggagggaacaaata

SEQ ID NO: 700 - DNA, 562 bp, Homo sapiens; identical to SEQ ID NO: 699

SEQ ID NO: 701 - DNA, 562 bp, Homo sapiens; identical to SEQ ID NO: 699

SEQ ID NO: 702 - DNA, 485 bp, Homo sapiens
gcgatcctgtgagggcacttctaggcacagtgagcatgatgaacaaaagtgggtgacatatgaaatcgcagctcttatttgatgatcagatagctagggcttgagtgagaaggattatagtgataaagctaggaaagtagaaaagttgcattaagttctggagggctttctatgttgtaccaaagaatttgtactactctttgtagttatggaacaatggccaagaattcttaaggagggcataatgattaaattttggctatagtaataactttaagggaagttaaagttattactgaatactgaactagatatgagagaggctgaaggcaacaacttcttttggaaaaattttaggcaaagactctgagctaagatcctgttgctgaaaatgggagagaagggagggggatgtgttagggacacattatggaggtagaactagtgtttagtaaaacaatgagatgtattaagggtaacacatg

SEQ ID NO: 703 - DNA, 409 bp, Homo sapiens
gccctattggattttggacctgcatggggcttgtagcttcttcattttggccagtttcttccatttggaatgggtttattaacccaatgcctgtacccccattgtatctaaaaagtaactaacttgcatttgattttacaggctcatagtcagaagggacttgccttgtttcagatgagactttggacttggaattttgggttaaagctggaatgagttaagtctttggggaactgttgggaaggcataaatgtgttgtgaaatttgagaaggatgaaatttgggaggtgcccagggtggaatgatgtggcctgactctgtgtccccatccaaatttcatcttgaattgtaatccctatgtgttgggagcagtccccctctgctgcccatgctgttctcatgatagtaa

SEQ ID NO: 704 - DNA, 409 bp, Homo sapiens; identical to SEQ ID NO: 703

SEQ ID NO: 705 - DNA, 485 bp, Homo sapiens
gcgatcctgtgagggcacttctaggcacagtgagcatgatgaacaaaagtgggtgacatatgaaatcgcagctcttatttgatgatcagatagctagggcttgagtgagaaggattatagtgataaagctaggaaagtagaaaagttgcattaagttctggagggctttctatgttgtaccaaagaatttgtactactctttgtagttatggaacaatggccaagaattcttaaggagggcataatgattaaattttggctatagtaataactttaaggaaagttaaagttattactgaatactgaactagatatgagagaggctgaaggcaacaacttcttttggaaaaattttaggcaaagactctgagctaagatcctgttgctgaaaatgggagagaagggagggggatgtgttagggacacattatggaggtagaactagtgtttagtaaaacaatgagatgtattaagggtaacacatg

SEQ ID NO: 706 - DNA, 485 bp, Homo sapiens; identical to SEQ ID NO: 705

SEQ ID NO: 707 - DNA, 409 bp, Homo sapiens; identical to SEQ ID NO: 703

SEQ ID NO: 708 - DNA, 17904 bp, Homo sapiens
cacacacacacaatttgtggttataatcgaacaagtccagttcaaacttataaacttaagtctatgacaaaaaccaagacatcacagtaggaacacaacactaaaggataagataaaatctacaaccaaacaattttcaaaaccttcctacagtgtggaattccagttgcttaaataatgccagttccatgaatttcaactgtgctctaatctatttctatacacacaggtacagagaaaagtggagatgtccttatgccgtgaagaagacattttgcttctggtctgcttaggtgcagttctttgttccaggcagattccaatcttcctgtttctagcatgaaataggacaaaagattctgtgagttgctcagtaactggatgaattttgtaatcatcatctcaatgataatacaaaggtttcctttccctaagtgataacaaagaaaacctctctttgtaattctttttgcaaggatccataagcctgaattctaaaaggagaggccaataaaaaggaaatgaagaatgttttaaaggtaaggggtttttttggtttgtttgtttgagacggagtcttgctcttgttgcccaggctggagtacagtggtgtgatctcagctcactgcaacctccgcctccatgttcaagtgattctcctacctcagcctcctgagtagctggggttacaggtgcccgccaccacgcctgggtaatttttgtatttttggtagagatgggatttcaccatgtttgccaggctggtctcgaactcctgacctcagatgatccatgcgcctcggcctcccaaggtgctgggattacaggcatgagccacctcgcccagccctgttttcatttttgagatgaggtctaactctgccatccaggccggagtacaggcacaatcacggctcactgcagcctcaactttccaggcccaagcgagcctctcacctcagcctctagaatagctgtgacaataggtatgtatcactacgcctggctaacttttttattttttgtagagatggggtctcactatgttgcccaggcttgatctcaaactcctgacctcaagtgagcctcccaactcggcctcccaaagtgccgggattacaggtaggagccaccacatccagcctgaagaatgttctatcatacgcttatccataaatagataaatgtatccaccaatagatgatgaactgcacaagaaaaatgggatccccaattcaacatgcttcctcagagaaccttacagcaagacagaaaatattttattacaaagtaaaataaaagacatagtgagtcagttctcttaaattcctcctccacattcagaaaggcatacagggtgattcaaacaaagatgaacggctacagcatagtttctaagctgccctcaagtgcagtgattcatctgaactggtgtcttatttacaggagaagatttggcttcatgaagaaatatcttcctgcataaaattcctgcaactaatcgctcgttgctgaaaatgccagggatgtgtttggtgtgcaaattacttgataaaattactaagacggattaaaatattgcatctgggccaggcacagtggctcatgcctgtaatcccagcactttgggaggccgaggtgggcagattgcctgagttcaggagttcaagaccagcctggccaacatggcaaaacccatctctactaaaaatacaaaacaattagcctggtgtggtggcaggcacctgtaatcccagctactcgggaggctgaggcaggagaatcacttgaacccaggaggcggaggttgcagtgagctgagatcgcaccactgcaatccagcctgggcaaccgagcgagactctgtctcaaaaagaaaaaaaaattcattaaacagagccccaaccactagccaaactatattaaaaatgattccacttagcaaaaataatacttacttacacatactttctcaacaatgcataccagatggagaaaggttattcctacgtgtggaatctttttcagggaaagtaggggcagctggggacaggatgtaatgaaattgttcactgattatatgacaaaaatccatcaaatggaagcttttttgttctttaagtaaattttacaattgaggggtctctattagagaaaggttctatttttgtggcttatcaactaggggtccttcatactaaagcaaaccaagtctttacatcattttaaagatttcctggagagacacaatttgtaagatgttatgggcgagtcagctaaaatgtaagccccagagtagagcagagaaacaaaaagaagtaaacacattcaggaacatcttatgatttttaaaacccgcaactggatttcatgagcgtttatgaagttggtaaagttacacgctctcatgttaatacaaaccagtcaccactgtgaaagcgttcatcacacactgagaggtgaagccatgccatggagacaggttatcttctcgaggtcatagccacctattcctctatcattttgttgtctattatttcaatttgtatccagctttcctcttggtacatccatgtaaacacctgcccaggatggagggctctcattcaccacgtctttcagcaggttggttcctctccccagtcagcaattgtgacatttggtgtctgtttcgaatggtgttggttagccaattggctttccacttcacataactgggaagactacaggaaaattacgggaatggaaatcaaaatgggaaaaacaagctatgtcaatgaatagacacatcactgacaatattttgcttcactggtatgtttcttgctcgtgtgttacaggaagaaagatctaattgaagccatataaccgagcaatttagaattgaggagtaactgaaagctctttttaatccatacttaaaaactaataatagattttcaaaggctcaaggaaataacacagtcaaaaccctttttcagtcatcttaaattaaagcttagcaaatttcatgagggattctaaaaaatattattattatttaaaaactaataatagaccttcaaaggctcaaagaagtaatagactcaaaatccttttccagtcatcttcaattaagcttagcaaatttcctatgagggcatatttcttcttcttattttttaaccaaaggagacctaaagagacttttgaaaatacttgttaattattctaaggaagctcgcctgtcactcagggtttctggaacagggaccagaggagctgggcttctcaaatattcaggcacacacaaaccacctagcggtcttatttagacatgcaggttctgatgcagaacatggattctggactgtcatgctgatgcctctgacggtcacatgctgacctggagtcacaggcatggctgtgtttatttcgctgacccttgcaatcaatcccctttgctctgcttcactgctgacctctgtgtgcatgaggttaagccccactcagtaaacgcagcctcacctggatgtggggtcgagtcagtctcattttttgggaattactaaatataaagatataccttccagatgtgagctcctgtcctcagaaattcttgaagatttctaaatccttctgcggcacgggcgcggctgtgtcccagtcattctcagggtaagtttcgaagttggaagtgtcgccgtcaccagctatcttgggcacgatgggaggctgtgagacatggccgaagcacaaaggcatggttagaaagggacgggacacttggatgctgcacacaccgctttatttctgtcactgtacctaaaaatgaaaatgatttgcaaaacactaaagctgtcttcccttcatttatgaaagcggcaatctttgaattaaaatattgtgaatgaggctgcgtgtggggactcacacctgtaatcccaacactttaagaaggtgaggcgggagggttgcttgagcctcagaagtttgagaccagcctggggaacacagggagtcccctgtctctacaaaaaatacaactagccgggtgtggtgctgtgtgcctgcagtctcagctactcagtaggctgaggtgggagaactgcttgagcccaggaggtcgatactccaagtgagccatgattgcaccactgcattccagcctgaatgactgagtgagatcctgtctcaaaatatatatatatagtattaagtaagctatggtacagtcatgtgatggaatacaatgcagtattttttaaaatgaggaagctggctaggcgcagtggctcatgcctgtaatcccagcactttgggaggccaaggtgggaggatcatctgaggtcaggagttcgagaacagcctggcccatggagaaaccctgtctctaccgaaaagacaaaaattagccgggcatagtggtgggtgcctgtaatcccagctacttgggaggctgaggcaggagaatcgcttgaacctgggaggcggaggttgcagtgagccgagatcgcaccactgaactccagcctgggcaacggagcaagacttcgtctcaaaaaaaaaaaaaaaaaaaaaaaaaaaaaaaaaaaaatgaggaagctagccaggtatgtagacaggtctccagattatatagtcaagtgcaaaaagcaagactataataatgtacatactacgctactctagatttgtataaatgagtggcaaaaataagaatgcatgtatccatgtgggtttttattagcacaaagaaactctagaaggatacacagaaaaacaataaaaggtgattacctacaggtggcttggagggggtaagagggagacttggcaatatatctgttttaatattgacttggtttttgaccaatgtggatagataaaacgtattcaaattgtttttttaatgcaatttaatacaataaagtatttgaaaaggtaaaactttgaacaaaatgatgcatcagcccaggcccagtggctgacacctgtaatcccagcactttgggaggccgaggagagtggatcatttgaggtcatgagttcgaaaccagcctggccaacatagtgaaaccccatctcttctaaaaacacacaaaaaaattagctggatgtggtggcgcacacctgtaatcccagctacttgggaggctgaggcagaagaatcacttgaatccaagaggtggaggttgcagtgagttgagatcactccactgcactacaccccgagcctgagcgacaaagtgagactccatctcaaaaaaaaaaaaaaaaaaaaaaaaaagaagcgtatcatcccaggctccagccccagaaactctggtctgagctgaggactaggaataagcatttctaagcattctccattcttttaactctgaagtgcaaaggtgaaaacactaccattgaccactcccatcagtaacatatgcagttcagagtgttcacaaaagccaagatatggaatcaacctaagtgtccaccaatggatgaaaggataaagaaagtgtggtccatacacacaatgaaaaactatccggccataaaatggaatgaaatcctgtcatttatagcaccacgaatggaatgggagaccatcatgttaagtaaactaagccaggccgggtgcagcggctcatgcctgtaatcccagcacttctttgggagactgaggctggtggatcacttgaggttaggagattgagaccagcctggccaacatggtgaaaccccgtctctagtaaaaatacaaaaattagctgggcgtctgtaatcccagctactcagggggctgaggcatgagaactgcttgaagccaggaggtggaggctgcagtgagcaagatcgtgccactgcactccagcctgggcaacagagcaagacgctgtctcaaaaaataaataataaataataaactaagccagacgcagaatgagaaacacagcgtgttcccactcatatgtgggagctaaaaaaatggatgtcatgaaggttgagagtagaatgatagttaccagagggtgggaagtgtgtatagctaggggatgaaggggagatgaagaaatattgcataaacataatgttagataaaaggaataagttccagtgtttgacagcatagttgggtgggcagagttaacaatatattgtatatttcagaatagctagatttgcaatattcccaacccataaaaatgataaatgtttgagctgatggataccctggttaccctcagttgatcattacacattctatgcgtgtgtcaaaatataacatgtacccccataaatatgtacctgtgatagttacactgcttagcagctgtgtaaccttccacacattgcttaacttctctgagcacagtctcctcatttataaaatggacaagtattatacattgaaaaaaatgccagatttttttttttttttttttttttttgagacagggtctggctctgtcgcccaggctggagtgcagtggcataatcttggctcactgcaacctccgcctcctggtatcaagcaattcttgtgcctcagcctcccaagtagctggtaccacaagcatatgccaccacgcctggctaattttggtattttctgtagaggcgggatttcaccatattgcccaggctagtctcaaactcgtgggttccagtgatctgcctgagttggcctctcaaagtactggaattataggcgtgagccacagcacccagccaaaaagccagatgtttaaaaataggcagtttggccagaaacgttccaaagaatattctccatgtaatacaccaccatcactgaacgatgaccatggtgctagacgcttgcttatctctgtaatcctgttgaccgctttccactaaagaggagggagtagggtttagcagtcacagagctagtcaggaatcaggccaggtctcctaaaatctgcttcaaaatctgggataagtgtccatccagggatgaatggacaaagaacatgtggtatatgactgggtgtggtggctcctgcctttgtgggagctaggtagatggttagcactaagacactcaaagagtggggaacttggcttatgaacagttttagacaaatagttgtattatataaattaatcacatgtcagccatcaataaagaagtcccaggattcagaggcagtccctgctaatggaagagctcgggcatactgagtcacccactgatatgtgttgtaccttcagttttctctgcggaacagcttcccagtccacggagcggaaccaccgatgatgcttcacatcattcgccccgttcttcaaaagaaacaacacatgtcgtcagtgtacagaattttgacagggcaggaaagaaaaataccccaaagaatctctacattattttagtattgaaacaaacagaccaagtttgctgcattttggagaactgtgcctggagggtgagctgccaggaaaacctgcaagcaaagctgttagtgttttgtttgcccttttttgccgcagaaacaaatccagtcattctgctcctgtgcaatgcatttgcattccggaccaaagacgaaaaaggtaaatacgattccatctctcgacataaaattggacagccagtagtttctcagtttgtctcctgttttcatcttggcaaacttactcagtattttacagacatagaaactagggttcaaggaatgatgttaatttgctccgtaggacccagcaagtaaataacaagactgggaactcaaaccaaggatgtccagtttaagagaccttaggaacgacattgcacggcctggcaattaacaaggtgcgttcaagtcggcctgcttcatgctcaagggtagcaccaggcatcgctggctcacactgtggccatcacgacctctgaaatccctcccaagtgctcatccgtaaacctcactctgcttccttttcttatacttgtagtgatgtcgttatcaattaaatgtgggacagcagaagaaataaacgtaggttccatgaaacagaagccagtacatctgaatttaacgcgtctatcagttagcattactgtagtttcaaatttcttatccttaaagaggaatacgtccacaaccatatcttcaaaaggaaacagtaatgtgaattttttctattgttttcccatccagttgttttgacaactttttcttttcttattgcaaaacaggtatttttgatctatagctaagtcaggcaacaaacaatagctgttgagttttcccttcagcaatgttgtgaataagaataaataagagtgctgtgaataagagaataaaataaattttatccatcagataaaattctaatttggatactaaaggatgtgtgtgtctgtatatactcacatgcatacatagtaatatatacacacacacatacatatatacacacatagattgatatatacatacttatacacatacacacattaatatatacacatacttatagacatacacacgttaatatatacatacttatacacatatacacgttaatatatacacacatatatttatatatacacatacttatatacatacacgttaatatatacacattaaatatacacatacttatatacatacacgttaatatatacacatgtattatatatatatatacacatatacatatgtactttacacactttatatgtagagtacaaagtatatgtatataccgagattcacattagtatccaaactagtgtgtgtgtgttatataaagtgtgtgtgaggggggtgggagcagtggctcacgtttatattccagcactttgggaggccgaggcaggaggactgcttgaacccaggagtttgagactaacctgggcaacaaagtaagacctggtctctacaaaaaaacataaaaaattagccagccttggtggtgcatgcactgagtcccagctactcgggaggcggaggtgggaggatcacttgacgccaggaggtcaaggctgcagtgagctgtgatcgcaccactgcactccagcctggatgacagagcaagatcctgtcttgaaaaaataaaaataaaaaaagtgtgtgtgtgggtgtgtatctacagtcatgagcctcaaaatgatgcttcagtcaacaatggatgacatatacagtgttgctcctgtaagattataatgatcttaaaaactcctatcccctagtgacgccatggccattgtaaccacaggacaatgcatccctcctgttacgctgccaggcgtgtaacagtctaacacatacgttacctacggcacctaatacttggtaatgataataaatgactatgtccctggtttatctatttactatactctatgttctttttgggggggcggggcaatggacagagtttcactccatcatccaggctggagggcatggcgccatcttggctcactgcaacctccgccttgctgtgtctcaaaaaaaaaaaaaaaaaagagagagagagagagagaaataagccaggcacagatagacaaatacagtctgacctcacttacatgggaaatctaaaaaagttgaactcatagaagcagagagtagaatggtggataccaggggctgggaaggggctgagatgggaagtcattggtcaaaagagacaaagtgagagagacaggaggaacaagttcagtcagtggcttgcacagctcggtgactataactaatgatgtattctcaagaatctctggaagagtagatcttgctgggtgcagtggctcttgcctgtaatcctagcactttgtgaggccaaggtgggcggatcacttgagctcaggagctcgagaccagcctgggcaacacatcaagaccccaactcttaaaaacaatttttttcttagatcttaagtgttctcaccacaaataaatggtaattatgtgaggtaaggcatatgttaatgaactcaatggacccattccacaatgggtacatatttcaaaacttcatgttgtacatgctaaataataccattttcatgtgttaatttaaaaaaaaaataaaataaagtcagtgttttcttgagtctctttcagtttatctccatatcaggaagctttaactagactttaagacctagcttgggagtttgtgagcttttccccaattcctttgattgggaaacttgttcttcccccttggaaggtacctatgatggtcactacgccattcccagcagattctagatatgggtcgtctgtgattccctgcagtcccagcaagagacccagctcttttctaaatggctgtggcattaaaacaggactcgtccaatcttatgaagagccgtggcacagatgagtccacaccgtgcaacctggctggataggctcctcggagacctgaaggtatccgttgctgtccgcaaataatgtaaaggacagaagcttgactactgttatagggtaaacaatgtccctcaaaaagatatgtgcacatcctatcccccagtgcctgtgaatatcactttatttggaaatagggtctttgcagatgtaactaaattaaggttcttgagatgacatcatcctggagaagggtgggccctaaatccagtgacaggtgtcctcataagagacagaggaggagacacaaacatagagaaggccatgtgaaaatggaggtggagactgcagtggtgtggccacaagcctagggatgcctggagcccccaggagctgggagaggcaggaaggatcccccactagagcctctagcaggaagcagacacaattatcacacattgggcagtggccctcaaaatatatgcccatgtcctgactcccagtacctgggaatggaaccctacatgcaaatagggtctttgtaaatgtaattaagggaaggctcttgagaagagataatcctgcattaggatgaccctaaacccaatgacaggcatccttctgagagacagaagaggagacacagacacagagaaggccacgtgaagaaagacagagactggagtgatgcggccataagcccagggatgcccggagcccccaggggctgggagaggcaggaatgatcctcccctagagcctctggaggcctgagacaccttgatctcagactcctcgtctccaggatggggaaagcagaaattcctgttgtttaagcccctagtttgtggtcagttcttatggcagctactggagactcgtaaaccacacagagggccccaagagagccaagtggttcaagcctcacaccccggtgtactgtgtctctccagactgtaatttacagggtcaagacgtatatggaagttcctccatgtataagtccctctgaggttgtccagagctagaaatggccaacaaaaagtccatgaattctgtcaaattcagggatgtcaaaacacgcatatcaggtatgatactacttaaggaatagtctgtttgtcaattatatacttgcctccacacaaaaagtttgtggaaatcatacctgatgcacaacttttaaaatcatcacctgcgcacacaaaacacctactctcatgtccatggcagaaccattcacaaaagccaaaaggtggaaacagcccagatgtccatccatagatgaatggataaacaaaacgaggtctgcccacacaatcgaatactatgcagtcaggaaaaggaaggaagctctgacacgggctacagcctggatgaaccttgaagacatcgtgctcagagaaagaagccagaggcaaaagcttacattttgtacaattccatttttagcagagcccagaacaccgaaccctacagagaaagtcagtagattagtggctgcttagggtaggggtccccagcccctgggccacaaactggtagtggtccacggcctatgaggaaccaaaatgggccgcacaccaggaggtgagcagcaggcaggtgagcgaagcttcacctgtactgacagctgctccccatggctggcattagcacctgagctccgcctcctgtcagatcagcagtggcattagattctcataggagcacacaccctattgtgaactgcgcaactaagggatttaggttgtgcggtctgtggaaaaactgtcttccacaaaactggcccctggtgccaaaaaggtcggggaccgctggcttagggcaagagaggatgaaagaatagcacagtgataactgaagggtgcagggtttctttttttgaactgatgaagatgttctaagattaaccacaggggtggctgtacataatcgtgtgtatactaaaagccaccgaattgcacattttagatgggtaaatggcatggcgtgtgaattcactctccgtaaaactgtttaaaaaataaaataaataagtaaacaaaataatgagtaataacttatgcattgttattgctctattaaccttgcttgaggggaggggagatacggtgtagacccagtttgacgttgtgggcccagaaaccgagatttgatagatctttcctggcagtttcaagtaaaatttaaaaaaataaataaaacaccagatttgaaatttgggcagtgattaaatacgaccgctaagccttggtttatacctgcacatgccaatgtgggtgttagacggcagacacgcacatcgggtaccactgaatacccacgggatcaaatactgaccttcatgtttcctaatcgccttgttctgtcaaccacgagcagtttcttaatgaggtctctatgttggggaaggagacaaaaaaaaaaaaagtacacagattatatatcaacatcagcaaacgcagcatggcaacagagataagatctatctgacatgaggaccgcagttcaatttccactttggcaaaacactttctagtgcttatttcctaccatcaccggctcttaaatcacctatgcaaggctgggttgccccgtgcaaggctgaagctaagggaagggggttgattacatctttgtaaagaaaatacacctctgagtagaaaagggtgaaatttatatgtgcctgcagggaggatccagacacttaacgtaaacatgcctgtcaggctgtccctgcaaaatagaagacatctgctttcaccaacatcaacactcacgcgctgtcctgggggtctgcttattgatgggattcctgttttaaaaggctggctttcccataagcacacacattaggatgagtctcctaagtctgcttcttcacttataatcttccttttaaataacagaccatgtcagaagtacagcaggtggggaggttgggcatactggctcacaccagtaatcccagcactgtggggaggccgaggcgggtggatcacttgacgtgaggagtttgagaccagcctggccaacatggtgaaaccccatctctacaaaaaaaaagaaaaagaaattcgctgggcatgctggcacacaactgtggtcccagctacttgggaggctgaggcacaagaaccgcttgaacccaggaggcgaaggttgcagtgagctgagactgagccactgcactccagtctgggtgacagaggtagagtcagtctcaaaaaaaaacaaaaacaaacaacaacaacgacaacaaaaaacagcaagctgcttcaattaggatgggtagttggagatgatgttgaagacttccaggagattaggtgagttctaaaagatgcatatttatggaagtagaaatgatcatgtgtgtctgtgtgtacacataaaatacacagagtacattatgtataataacatacataatatgatataataatataatatattgaagtcccccaaaacaatccaatacccatgaccccggtgtaagcgtctaggctttcccagcataaactatgccccaaggtaagtagcacgaacttggactgagccactcccaggttctgtgacagactgtggagtctccgacaagccaggtgacgtcctagggtcagactccaccatctagattgtgaatctcgccagtgctgtctgatcggaaattttacagtttcctgccaccatgctttctgaattaggatgggatgcttgtcagacttcaccgcttctctgccacaaagtaaaactcagagaccatctgtccgcccacctaaggctaggattttgtatccatcctgtaaggctgaaaagctttgagcaggatggggaatataaaaatcacctaaaagttagaaacctttccactacttagtgagtttctccttcattattttgacatgctcccccctgccaaaaaaaaatcaaggttatcaaacactatacccccaaaacattcccaaataaatgtggggcttcgtcccccacgtgatttacaccactgcctgcccccttaccacacacacttaaagctcactggagtgcaattataagacaggtttatttatgcttttatattttagataaacctttgttttcttataatcccagtccaatcagctttaagtgtatacgctaatggggcaggcagtggtgtaaattataggggggaaaaaaagccctatgtttatttcagaatgttttggtgatcacctgataaatttcaacgtgtgtgtgtgtgtgtgtgtgtgtgtgtgtgtgtgtcatgtaagaaaacaaaatgtttgatgaccttgaatttttttttaaatttttttggtgtttggcatgtaagaaaatgaagatttatttaaaatacaggggacagtggcttgtaatcccagctatgcagtgggctgaagtgggaagaccacgtgagaccaagagttcgaaaccagcatgggcaacatagtaagaccctcgtttctacaaaatatcaaaacattggccaggcatggtggtgcatgcctgtagcaccagttactcgggaggctgaggtgggagtgtcatttgagcccaggacgtcgaggctgcagtgagctatgattgtgccactgcactccagccggggtgacagagcaagacacccgtctctttaaaagaaaaagtaaaataccaaagcaaactcttataaagcagtctagaaagtaaagagtatggatgagaagaggcccctgaagatgcaaagccctataaaggaacgacagaagtgtccacagctgtagatgggtcccttgaccccgggataagcgacacatctgccggcactcttttgatgcactgtagccaaaattctacattttatttacgatcctggcaccagctggctcctctcagatgcaggtactttcaggtgttgtaaaaaacaccggcagataatacctctactgaattggcaacaagtcccaaagctttgttttggtgttttgttttaaatgatatttatttctataaggaatgtcaatcctgatgtgccatttgcccaggcgacatgtttacctggtcaaatgataaaagttgcaggaaccaacatatgactttaaaaagcagagaatcaaaattctagcatcatggacaaccagggacagtgatttggataagaaaaatgcctcattaaggccaggtgcagtggttcacgcctgtaatcccaacacttggggaggacaaggcaggaggatcagttgagcccaggagttcaaaagcagcctaggcaatgcagcaagatccccatacccatctctaccaaaaaaaggaaagatatgagtcattgaggtcttgcttctcagccaatttgataagatttaacaaataatgggaagaagtgaactgtcagttcacttctatctatcactgtttctgctcttggggaacccacactgggtatgtaaagaaacaggggcactgtggggaacactggaaggggctgggagctgcataaagagaggcatgttagatcagacagtaccaagatggtcgctgctggttccctactctcaaagaagataaactaggagagaaagaaggacaagtggcaagagaccagactttgattacgcttctggtttattctatttctgcaattcctttttttgttgttgtttccacagaacattggaaaccccccccatatatatatataattatatcttttaattttattattttttcttttcttgacacagagtttcactctttcatccagtctggagtgcagtggtgcaatcataggtcactgcagcctcgacttcctgggctcaagcagtcctcccatctcagcctccctagtagctgggactacaggcacttgctaccatgcccagctaatttttaaattttttgtagacatggggtcttgctacattgtccaggctggcctcaaactattggattggccccaagcaatcctcccacttcggattgctcctgaagtgctgggattacaggcatgagcacctcacctggccaaactcgatcataaaagtgctttgccatccacttaatataatgtcactcaactcagatgggatttggggcctgagagagaggttctatataatcctttctatttccttccagagcagtcggcttctgaggtgctgtttcccctgacacctccctgtcttaccattcactggacagggtgtcccttctaggcgactcattgttaagcggagcctcgttttcttgctaaagtcttttaaagcctgcctcttagtgtgtcaaacacaacacatgctcaagccaataaaacacgaccttatcttctgttcagactaagaacctctggttaggatggggtgcgttcaccaccaagaaactcaactgaacgtagccagtggccccataaggggcatattcaaaacaacctgctccatcgccctgaaataagtcttctctgaactgaacttccaccggctcataagaaaatagaccatggaaaagaaaagtttaattctcaactagatgcatttagctctagtttgtgcccagggggctggtgcacccatcaactcatctgaaaaatacagtgaaacaaacagaaatcagtgcttattacagtaaaaatggctaccagttgaccagattgggtaaggtagccagaaaaccaaaagcattcttttttttttgagacagaatcttgctctgtcgcccaggctggaatgtagtggtgcgatctcagctcactgcaacctccgcctcctgggttcaagcgattccgctgtctcagcctcccaagtagctgagactacaggcgcccaccaccacacccagctaattttttatattttcagtagagccgaggtttcaccgtgtttcccaggatggtctcgatctcctgacctcgtgttccacccacctcaacctcccaaagtgctgggattacaggcatgagccaccacgcccagccgcgttcttatatttaagaaaataatatattttttccctactgccacgacctttataaaatgtgcatccaaagttgccaatatccagcaactgtaaatatccttgaagcaacatgctcagaactgaaaatgttgacgttaaaaaggacttagaggttgagcataatttaagcaggagagaaaggataaaactctgctaaacccatcaacagttctgttagccacagaactaggaggatccttcttgtcaaattccaaaactgctctcttataaaatacgatgacaaactcgttcattggctcattttaaatataacataccaccaaaagaacacaatacggccaagactcattaaaatgtgaagctatcattaaagtagaatactgaaaatctttttcttttcttgtggaaaagacaactgtccaaaatagtttatgcgcagcacatttaataacacaatatggtatcctgctgagtgcgtgctttcacggtgattttagacactttaaaaataaacacacctcatgatgaggcaaacggtttacttactttacatggaaatccaaatgtctggggaaatctattttgcctgcaagaattttctgataaatgccaaacgggttgtcatcaaaaaacggaggaaacc

SEQ ID NO: 709 - DNA, 160 bp, Homo sapiens
agaggatattgaatgttcctaacacaaagaaatggtaaataattgaaatggatatgctaattaccctgatctgattactccattctttgtatcaaagcatcactgtctaccccatgaatatgtacaattattatgtgtcaatttaaaaaataaaataagc

SEQ ID NO: 710 - DNA, 4507 bp, Homo sapiens
ctgacagatttttctaatttttgtagagatcgggtcttgctacgttgcaggctggtctgaaactcctgggctcaagcgatcctcctgccttggtctcccaaagcactggaattacaagcgtgcacctccgtgcctaattatagcagcttttttgcactctgtgcaacagagactgtgtgtcccacaatgcagaaaatatctgccatgtggcccctacagataattgcccatccctcgattagaccaaaggagaaaagccacagcttgtttggagacagaagcagatgaaactcagacttctgaaaagatacaaagttttattaaacaaacctggaatcaacagtattattacataaattagacagcagtaaaattttcctagggcatatgtacaaatcacagtgatttccattgtgcaacaaacagacaggattaaaaataggcactcccctccccgaccccccatgagaaggggtcaccccgcggggttcccagttctggctcgccaaggggtgcacaaacctgccaaggcactctgcctgtgtgcgcggcatccggcggcagtgacaggggccccagaagcacgttggcaacatggtgaggctgcccagtgttcagcgcaaagaaagaattcagctacgacagttgagcagagctcaacagccatctcagagcacaaggactgtggaaaggcttcaagtctcatctgctaaaacacaattgtaatgccttttacatacagaacagacgtgtccaccatggaagatcaaactaagcctcaacagaacttcccaacacacgataatttacagaaaaccatgacagagcatccctgctattaggaagggactgttctgcggggtgcaaggccataaggtttgcaaagcaaacttgattatgaaaaggcttggtgaaaatacagcccctcaccttcaccaagacacacacacacacacacacacacacacacacacacacacacacacaccccgcaaagaaactatccaaatgcattaagacacctgttcgtgtgcttttcttcttgcttttgttaagtgaatcccatccgtttaagttagactaattagaaggcctgcttgcctccatcagcaacagaaaaacagtgcatacgactcctccaatgtgtgtaaaatgcatgctaggtagattgaaggaaaaacgagaggaacccgggcaccccatttcaaatctctacaactggagaaatcaaaggctgcaaggactgtgtagacctgatgcaaagttaactggctgcaaaaatacaacccaagccagtgctgtcttgcaccctgttcactcagtagctggagcaatgaatgattgtgacattctggtggggtatttgtgcagcctgaggtgcacctggctacagagtggagccttggggtctttaacagtattaagccatagtttcacagttacaatggtccaaagaattagaggccatgtaggtcaaacacagaaatggcgaacacatcccaaaccactcaactgtttagttccactggtgattttttttaatggacagtgatttcaaatgatttggtgtttttgttcttgtttttgctttttcttcaaagcaaacaaatgatttggtctttaagtatggacagaaagaaacaaaacgctgaatgggaaattcagtaacaagtgattgtgcagttgtttgatgggcatggagagggagtggggctgaactgcattttgaggggatgaagcgcgcaatcttaccccactgctggggggtttctgcttcttattctatcatgctgacagcaaatataatttgcccatcgctggctatagatatgtttaggctaagcaggatttagacttctgttgcgaaggaattagaagaattcagtagagacagtgtatactatttggttgtgactttatttccttcctggctttatcaatgcctatgaaagcaggccggtggcatttcccttcagaaaaacaagacttgccccaatacacttcttcttgtaacatatccatgtcctattctcttagagtattccaatttaagaaaatattgccaactcgtaaaattacatgaagcaaagtaaatttgtaatgtttttctgatacaaatgttgtgattatggtaatgaattttcctccacattttgcgcagtgattgtttgtcatgatcatccatacggacattctgcaccgtgattgtttcgtgatcatccatgcggacatttcgcaccgtgattgtttcgtgatcgtccatgcggacattttggaatgcccacccgggtcagctatttgtattttttttatttttatgttttgagacggagtcttgctctgtggcccaggctggagtgcagtggcacgatctcggcttactgcagcctctgcctcccgggttcaagcgattctcctgcctcagcctcccgagtagccaggattacaggtgcccgccaccacacctaatttttgtattttagtagagatgggggttttgccatgttggccaggctggtctcgaactcctgacctcaggtgatccacctgcctcggcctcccaaagtgctgggattacaggcgtgagccaccatgcctggccaggtaaactattttaaaattatacagtgattgctccatgtttatagctcattttgattaaattaacctctacatgacattgggccatttaaactatgaccccgccatgggcagttaccaggtagcttgtgtcacttcaaatgctgaaatgtgtgtgatggtccaaagtgggtttcacaccatcacacgttcttggaatcgcttctaatttctcatttgttctgtatggctggaggctgatcacgacgtctgtaaagaacaaggtcaccaatgtgcttgcatatttcattttcctgcatatcagttcacaattaaggcatttcaggctttcctgatgctaattctcatctgagtatgaaatcctggataataaaacagacaacctaaaaataggcatatggactcatggatttatgtactttttaaagtgtgctcaagtgtttcatttatggttttattaataatttttaaagtagaatgttcaatattattactatgatttatttttatagtcagcaaacatgagacttaaaagcttttccttctagctccacatgtcggtgcacagtgtaaccttttcttaaaaaaatatggaatgctgcatgaatctgcagatcttcctcgcgcagggggccatgctaatctcctctgtgtcattccaattttagtatacctgctgccgaagtcagcaccagtttcaccttttcacattcacggtaaaactgatgggaaaccgcacgctaaatgtttaggcagcgatggccctcaactgttaatcccaacaggatggtgagtgagaagcacaggctgaaaatagagttgtctaaaacatttccacatttcaccatctgaacatcattttccactgagttattaattgtaaagagtttattctgctgaacctactaattattctcacctactgagttgacctccacgtgaagaaaaggtcactgatgaaaaagggtggctatgttctgtttctgtaatttcactgttttaacatctttttttttatatagagatggggtctcgctatgctgcccaggtcggtctcgaactcctaggctcaatcttcctgcctcagcttcccaaagtcccagggttacaggagtgcaccaccgcacccagcttcactgtcttttaaagccttaaggtggacgttctcttcaatccatcttcaaaagcacaaagccattgccttctttttttttttttttttttttggacagggtctcactctgtcacccaggctggaatgcagtggtgtgatctcggatcactgcggcctggacctccccaggctcaagtgatcctctcatctcagcctcctgagtagctgagactacactcacgtgccaccatgcccggctaatttttttgtattttgtagagatgaggtctcaccacgtttcccagactggtctccaactcctgggctcaagcaatccacccacctcagcctcccaaagtgctgggactataggaacaagccactgcatccagctcagatgaaatttttgaatgtgtcacagaaggtttttttaaatacagtacattcctccaacaacttcaatgtcattgtagattcttggaataaattcgctcccatatcttcccctctttgtttcttcttttaaagtctcaagttaccaggtaagaagcactaaagatactgaaggtagacctccccatgatattttcttccccaaaactataaaatgcatgtgagatgattttttttaatgcatgcaacatacccttcagatgttgtccccgagaagagatttttgaaaaaacaaattgaaaaataaaaattataggctctgtaaagtatgaacatttacatcactgcacaatttctgtgcatctgccataatgacttctatatatacacacaggcata

SEQ ID NO: 711 - DNA, 1687 bp, Homo sapiens
agatgatttcttaaacaaaatacaagatacaaaaatcttaaacgagatacaaaaaaaaaaaagaaaagaaaaaattgataaatttcccagtataaaaattttaaaattagaatgtgggccagatgcagtggctcacgcctgtaatcctagcactttgggaggctgaggcgagcaaattgcctgagctcaggagtttgagaccaggctcggcaacatggtgaaaccccttctctactaaaatacaaaaaaattaggctgggcatggtggctcacgcctgtaatcctagcactttgggaggccgaggcgggcaggtcacctgaggtcaggagttcgagaccagcctggctaacatggtgaaaccccgtttctactaaaaatacaaaaagtaagccaggtgtggtggcgcacgcctgtagtcccagctagtcgggagcctgaggcaggagaatcgcttgaatccgggaggcggaggttgcagtgagccgagattgcgccattgcacaccagcttgggcaacaagagcaaaacttcatctcaaaaaaaagaaaattagctgggcatggtgttacacacctataatcccagctacttgggattgggaggctgagacacaagactcgcttgaaaccgggaggtagaggttgcagtgagtcgagatcacgccactgcacttcagcctgggtgacagagcaagactttgtctcaaaaaaaaaaagacctactctataggaaagcaattcagaaaagagtaaacaactatatgaatatgttagtttcagtagtaatcaggacagtgcaaaatcaaataacagtgagatcaagtgtctccttattggtaaaaattaaaacttttttttttcttttttggagatgccttctcactttgtcacccaggttggagtgcagtggtgcaatctgcgctcattgcaacctctgcctcccaggctcaatcagtctgcccacctcagcctcccaagtagctgtgactacaggtcctccccaccacgcctggctaattttcttgcatttttgatagagatggagtttcgccaggttgcccaagctggtctcaaactcctgagctcaagcaatccgcccaccttggcctcccaaagtactgggcttacaggcgtgagccaccggacccagcaaaaaaattaaaactgataataataagtaatgtaaacatatgaggcgatggaaggtcactgttgtttgaagtataaactggtatagcctttttggaaaataatcacaatatctcaaaaaattaaaaatgaagattgaaaatacctccaacattttcacttctatgcatataaactagaggaatttctcaaggagattgggtaagaatgtttgttgtgttatttgtaacagtggaaaaagtatactgtaaatctgttcaagactaggtaaatgtaatatccataaaatggataacagtgaaactatatgtattgttttctttttcaagccattaacatggattattttggttgtaggttaaatatgttctgtattataaccctctccaactgtgtaggaacagatttgctaatttacatttgtagagttttcccttaagtgatcattattactgatatttccctaaattcaagatttttttccttaaacattgacttctcttaatctattcaaggaaaatagtagtattcaaaaatt

SEQ ID NO: 712 - DNA, 1688 bp, Homo sapiens
agatgatttcttaaacaaaatacaagatacaaaaatcttaaacgagatacaaaaaaaaaaaaagaaaagaaaaaattgataaatttcccagtataaaaattttaaaattagaatgtgggccagatgcagtggctcacgcctgtaatcctagcactttgggaggctgaggcgagcaaattgcctgagctcaggagtttgagaccaggctcggcaacatggtgaaaccccttctctactaaaatacaaaaaaattaggctgggcatggtggctcacgcctgtaatcctagcactttgggaggccgaggcgggcaggtcacctgaggtcaggagttcgagaccagcctggctaacatggtgaaaccccgtttctactaaaaatacaaaaagtaagccaggtgtggtggcgcacgcctgtagtcccagctagtcgggagcctgaggcaggagaatcgcttgaatccgggaggcggaggttgcagtgagccgagattgcgccattgcacaccagcttgggcaacaagagcaaaacttcatctcaaaaaaaagaaaattagctgggcatggtgttacacacctataatcccagctacttgggattgggaggctgagacacaagactcgcttgaaaccgggaggtggaggttgcagtgagtcgagatcacgccactgcacttcagcctgggtgacagagcaagactttgtctcaaaaaaaaaaagacctactctataggaaagcaattcagaaaagagtaaacaactatatgaatatgttagtttcagtagtaatcaggacagtgcaaaatcaaataacagtgagatcaagtgtctccttattggtaaaaattaaaacttttttttttcttttttggagatgccttctcactttgtcacccaggttggagtgcagtggtgcaatctgcgctcattgcaacctctgcctcccaggctcaatcagtctgcccacctcagcctcccaagtagctgtgactacaggtcctccccaccacgcctggctaattttcttgcatttttgatagagatggagtttcgccaggttgcccaagctggtctcaaactcctgagctcaagcaatccgcccaccttggcctcccaaagtactgggcttacaggcgtgagccaccggacccagcaaaaaaattaaaactgataataataagtaatgtaaacatatgaggcgatggaaggtcactgttgtttgaagtataaactggtatagcctttttggaaaataatcacaatatctcaaaaaattaaaaatgaagattgaaaatacctccaacattttcacttctatgcatataaactagaggaatttctcaaggagattgggtaagaatgtttgttgtgttatttgtaacagtggaaaaagtatactgtaaatctgttcaagactaggtaaatgtaatatccataaaatggataacagtgaaactatatgtattgttttctttttcaagccattaacatggattattttggttgtaggttaaatatgttctgtattataaccctctccaactgtgtaggaacagatttgctaatttacgtttgtagagttttcccttaagtgatcattattactgatatttccctaaattcaagatttttttccttaaacattgacttctcttaatctattcaaggaaaatagtagtattcaaaaatt

SEQ ID NO: 713 - DNA, 399 bp, Homo sapiens
tttaaattttttttttaatagaaatgggatctcactatgttgcaggttggtagaactcctggcctcaagcaatcctccctcctcagcctcccaaagtgctgggattataagcatgagccactgttcctggccagtagctctattacctaaagtgtttattacatgccagatactgtctgctaagtgcttaaattgatttttttttaattttaaatcttcgcaacaagtctttgagatagatatattaaaaatctggttttatgaataaaataaggcttagcaaagttaattaacttgctcaaagtgatatagtcagtagtacagcagtagtaaatccaggcagtagtgctgcagttgcattcttaatcactatgctatattgcttctctgttatctttt

SEQ ID NO: 714 - DNA, 399 bp, Homo sapiens
tttaaattttttttttaatagaaatgggatctcactatgttgcaggttggtagaactcctggcctcaagcagtcctccctcctcagcctcccaaagtgctgggattataagcatgagccactgttcctggccagtagctctattacctaaagtgtttattacatgccagatactgtctgctaagtgcttaaattgattttttttaaattttaaatcttcgcaacaagtctttgagatagatatattaaaaatctggttttatgaataaaataaggcttagcaaagttaattaacttgctcaaagtgatatagtcagtagtacagcagtagtaaatccaggcagtagtgctgcagttgcattcttaatcactatgctatattgcttctctgttatctttt

SEQ ID NO: 715 - DNA, 1362 bp, Homo sapiens
gaaaggaggagggaacagcgtggagcaattcatctggaattacctcggtgtgcagaggctgtcccttggctccacttgggataaacattgtgaaacatcgtgggcctctttcttctcaagctcctcctgacagcctcctggcaacactagaggcctcaagactatggagatcagaattgcaatggctttgtcatctcagcattgaccactcctgagacccaaggttcctcctgggagcaggagacaaggagtttgtgatgttggatggaaaataggatatatgaatgcagaagggctgtgctggacccctcttttcgcttctctccctgctgtcagcagtgtctctggcatggaggcgaatctgttgtgggtgaaacagaagcccctggggtaggaccagaccccaggcctgaaaaggatgcaaagcctgctgtttcaggctgtcaggaagaatcgtgggtaccgagtgattatgatgaaatgcaacccagagaggaaatgaatgggccctcactaagaagtgggtctgacatgtctctggcagcccaccggcaagagcacgacatgccctgcagccccaccatccacactacatgatgtgggagggctgtctgttcattcttacactggggacccaagcctgctctgaggagtgagtcacagccctgacgtgcgccttgcattactgtttcctgagatgtgcccggagactcaagcttgctcatttctgtcctgacacagctcactgttccttaggtggtcatagtcctcccgtgctgtgtcagctcctacatagcattagtctttcacgtgataaagtgcaagcacttttccattttacagtatttggggaaattctaacacactccccagggatttgtgcatgtccttctgcctccccggtgggtcattctgtggattccgcacctggcagtcggtcttcccccttggaagcccctaggatccctgtttctacgggcctggtccttggtttctaccccagtcccttttggccggcacctgcctggaactgcctggagcgccatggtatggggaaggacaggtggaaccctgaccacaacagatccttctaaaacaacagtcacattgatgatgatgagtgcagtggggtgaatgtcgtcacagcatgcatgctgggagctgccaagggcttacaacaaaagcagttcttcctaaggcaccctttgcatcttcccatccacgcctctcagtgcatttggaacttgcttatgcattggaataacttgagtcagctgctcgtttctgtgcctctgcactcacaggttccttcattaacattttaaataagtggttaaaaactcctctggaggttgtttttga

SEQ ID NO: 716 - DNA, 720 bp, Homo sapiens
tgtgtgcacaggcgagcctaagtgtgtgtactcatacacacagataaaccgaaaggacactgggctttgtgctggcaaaggctgtgatgctgctgtggctttctatgggccctggggagtgtcagatgggaagtgctttgatggcatgttgttcagtgtatttaatggggtctcccatggcccgaggacccactgtgagcactccacccactgtggcgcagaacacggctggagtcatcatagcccaggtctttattgaaagggagtgttgacccagaagcctcatatagaaaccatttggcaaggtctggaccatctctctgcaactgacctgccttggccgcacagagggacccaaacccaaaaggcccagacccaagggagactgaatcacatttaccattacaccagctttcatttatttgtttccatatgatcatagggactgtattactaagtatgcttataaatgctatttacagactgttcccttttataaggtgaaagattaataaagaacaaaaaattgcctgtagaaaaccatgcctgaggccaggagcagtggctcatgcctgtaatcccagcactttgggagaccaagacaagcagatcacccaaggtcaggagttcaagaccagcctggccaacttggagaaaccccagctctacaaaaatacaaaaaaaaaaaaaaaattagctggcatgatggtgggtgcatgt

SEQ ID NO: 717 - DNA, 1408 bp, Homo sapiens
atctttaacatattaaaatagacatgagaaaaatgtgtcatttgataaaatgggggaaatgtaataaatgattaccagaaatataaaattaagccgtatatgctcttaagtaaatcgaatctaggcatccttaaaatgtaaaaaaggatgcaacaagagtaaggagcccagaatgatgtaaattacaggaatggggtgtaatgtaacctctagaggaggtgatgtttagaagaagcaaagagaatgcaatgagaagcaaacttgttttaggcaaattctcctggagtggaccaggcagccccctcttccagactcagttccagagattcccttatgtgggtatttgttttattattcctttgaggactgcatttggtgtttagttcatcctcatgtggaccctatggaatttccaagatgcggggccttagcactgtggcaccttcctgccacacgtacataattcacagcattaccaagtcaccacaagccccacgctcacctctgtcagcccaggacccagccaggcagtgccacgtggtctcccaggctcgcttctccaagccgaactgcgaaagttattgaggcactggcccagggaactgagccttgggcctgtcctaaagctccataggtgactgcactgcagcccacatggagagctgcagctctaacacagggattttgagaggcctcagtgccatttaagtggcacttccaggacacccatcctgagctcccacaaagggcgccaccttcccaagaacgtctaattgtcattggaacagccagtgtcaggcagcttctgctcaggctgatgtggcgtctgacccttggtgggttgccagacattccttcctgtttctgccatgggaagttggcactgggaatggtatggagcccccacttctaccctgagccttgggtgtctgctgcttccaggtgaaaaatggacatttctgatactgcccagccactacggcaccacaacccatgctcatagtctccagggatgtgtagaacggcaatggcaggacagcaaacaactggcgatttccccaggtcccacgctcttgcggagtgagtatgttgggtccctgtcccagtgtgttccagccttacccaggtgcacagagtaccctggggccagcacagggcttgtccagtgatgctcctggtgttcacaaaatggctccagagatacctgcattttgaaaagcctgccgagccagcaagtgtagggcaggacccggatttctttggcaaatctgaaggtgagagggccacttgcctgctgagtagaagctgcctttacctggccagtgtatgcaacttgagagaaaatgacagctgcatggggcgctctggtgggactgggaagtctgatcttccggggagctgtagatag

SEQ ID NO: 718 - DNA, 301 bp, Homo sapiens
cattttccagccctgtgtgagctttgaggattgttttgcttccttctactggtggttcattttttctgaggcgggagtttattttctcacatgcttagatcagtagtcagccaaacccttagggaacccccacttgaggtggctggagctctctctctgttcagcttcctcctttctgacactctggcacatagattctaaatacctgatctccctgaactcagaggttgtctcaattaagtggaaacttcaggctcttggtttcttctccctgtcatttggcctggagactgcttacagg

SEQ ID NO: 719 - DNA, 301 bp, Homo sapiens; identical to SEQ ID NO: 718

SEQ ID NO: 720 - DNA, 301 bp, Homo sapiens; identical to SEQ ID NO: 718

SEQ ID NO: 721 - DNA, 483 bp, Homo sapiens
cttatgacatgcctttatgtggtttttgtttatttatttatatttttaattttaatttttatttttgagacagggtctcactttgttgctgaggctgttgtgatcatagctcactgcaaccttggactcctgggctcaagcgaacctcctgcctcagcctcctgaatagctgggattacaggtgtgcaataaaaagtattcctggctaatttttactttttttttttttttttggtagagacaaggtcttgctatattgcccagctgatcttgaacttcttggccttgaacagtcctcctgccttagcctcccaaagtgctgggactgcaggcatgcactaccatgcctaattttcttttattttttatattcatataataaatacgatttatttatttatttattttgtttgagacagggtcttgctctgttgcccaggctggagtgtggtggcacgatcatagcttactgcagctttgact

SEQ ID NO: 722 - DNA, 483 bp, Homo sapiens; identical to SEQ ID NO: 721

SEQ ID NO: 723 - DNA, 483 bp, Homo sapiens; identical to SEQ ID NO: 721

SEQ ID NO: 724 - DNA, 317 bp, Homo sapiens
gcatagatccaaatggtggttttaccatttactagtcatatgattttatgctgcccataattcaatatcatcaagctttgttttattcatgcaatatagataaaacagtatctatctcatttaaaccattgcaaaattaaatgggatattctagataaagctccttttatagtgcctgaaacataacatggacttaaataagaaagggtaattattcttgattatgataaaactatcaagattctggatgtattttagccaaggcagagtaaaaagagaactgagacaagaggcagaaaatttacatttgaatcaaa

SEQ ID NO: 725 - DNA, 318 bp, Homo sapiens
ttcggcccggcccggtggctcacgcctgtaatcccagcactttgggatgctgaggcgggtggatcacgaggccaggagatcgagaccatcctggctaacacggtgaaaccccatctctactaaaaatacaaaaaattagccgggcgtggtggcgggcgcctgtagtcccagctactcgggaagctgaggcaggagaatggcgtgaacctgggaggcggagcttgcagtgggctgagatcgtgcctctgcactccagcctgggcgacagagcaagactccgtctcaaaaaaaaaaaaaacaacaagaaacaaaaaaaaa

SEQ ID NO: 726 - DNA, 532 bp, Homo sapiens
aataggcacagtcctgaaagagcacagtcctgaaagagcacttctaattgggcatacaagcaagctcataataaagttctcctaggaagttttcctcatgttttgaagatgatacacttagtccctgactggggatggtttcgcttacactttttcaactttacgatggtgtgaaagtgatacacgttcagtacgttcctcaattaacaatgaagctatgtcccgataaacccatcataagttgaaaatatcctaagtccataatgcacttctgatataatggtattttcaacttacagtggctttaccaagatgtggcgcattgtaagtcgaggagcatccatccctgatgggatatataaggatgagatttatgcacagatgttcctcagcttatgatgggatcatgtcccagtaaagacactgtaagttggaaacatctgaagtcgaaaatgcatttgatatacctaagctatcaagcatcatagcttagcctcacctgccttcattgtgctcagagacttaaacgtta

SEQ ID NO: 727 - DNA, 1502 bp, Homo sapiens
ggagaactatttcctgtgactaaaagtggtttacatattggtgctttagcaggaattttggagggtggcttaagtgaataattaaaacagaaatcttcctagacgatgtttatcacactcaagacattaaaaattagagtcaagggactgctaagacttggggtgctggtgggtgaggctgcctttcagggaggccatgctgtgagttgagaatcctaggccaccttgcctgcactgccagctttgcagctgtgggcacatctggatccccatttctgtgcgggtgcagacaggtgaatgttacctgcgtgcatcataaaatgctgtgaaaggggtcacaggtattgcccaggcttgggcagactcattcatagggctcactggcttgcatgagaagggatgctgggcacggtaaacacagaaggagaaggcaggctctgctgccaggagcttgcaccctgagccacgtggaactggtttgcctgtgaagcaataggcacagtcctgaaagagcacagtcctgaaagagcacttctaattgggcatacaagcaagctcataataaagttctcctaggaagttttcctcatgttttgaagatgatacacttagtccctgactggggatggtttcgcttacactttttcaactttacgatggtgtgaaagtgatacacgttcagtacgttcctcaattaacaatgaagctatgtcccgataaacccatcataagttgaaaatatcctaagtccataatgcacttctgatataatggtattttcaacttacagtggctttaccaagatgtggcgcattgtaagtcgaggagcatccatccctgatgggatatataaggatgagatttatgcacagatgttcctcagcttatgatgggatcatgtcccagtaaagacactgtaagttggaaacatctgaagtcgaaaatgcatttgatatacctaagctatcaagcatcatagcttagcctcacctgccttcattgtgctcagagcacttaaacgttagcctgcaattgggcaagtcatatccaaacaatgctgacagcaccgcacactgtagggtatcagttgtttaacttcgtgaccgtgtggctgactgagagctgtgaatcactgacattgcccggcattgtcagagactatccgaccgcatatcgctagcccaggataagagcagaattccagatttgaagtacagtttctactgaaggcatattgctttcgcaccatcgtgaagtcagaattgttaagtcgagccatggtaagttggagaccatctgaataacaggatgagatgtagagcaggatatatatgttagaaacaaagtttcgcgaacagtgcaaacgttttctagatggactatcctactcttctctatctcattaaacactttgctggcagcaactcactgagttgaattcccgctccaccagtagcctcccctgggcgttggaaggctctgccctctgatgggggtctccc

SEQ ID NO: 728 - DNA, 1502 bp, Homo sapiens; identical to SEQ ID NO: 727

SEQ ID NO: 729 - DNA, 615 bp, Homo sapiens
ccttgcctttgcaggtgagcgggtgcagggaggtgcggggtggggtggcggctgcagcagtggtggttgggggccctgcaggctccctcggggtgtagcagggacatggtgtggtggttaacaggagtaggccactcatgtgggacgtcaggactagtgccacaaaggcagccctgtcacacgaacaggttcttgggggacagaggtctgtctgggactggctaatgacctggaaagactggagaggcaccattgtccaccaccagatgtatggctgcagggtaggagtagacttaagaaggaacactgttggctgggcgcagtggctcacgcatgtaatcccagcacttcgggaggccgaggcaggtggatcacctgaggtcagaagttcaagaacagcctggtcaacatggtgaaaccccatctctactaaatatacaaaaattagctgggcgtggtggcaggtgcctgtaatcccagctactctggaggctgaggcagaagaatcacttgaacctgggaggcggaggtcgcagtgagttgagagatcacgccattgccctccagcctgggcaacaagagcgaaacttcgtctccaaaaaaaaaaaaaagaag

SEQ ID NO: 730 - DNA, 615 bp, Homo sapiens; identical to SEQ ID NO: 729

SEQ ID NO: 731 - DNA, 669 bp, Homo sapiens
ccgcctagcatttttcattggaaaggtaatggcaaaacagtatgaaagaaccttaaaagctcatacttttgttcattcaacaaacatttcttctgttctgtattacgctttctgctagatatgaaatggatactgccatcatttctcaggtcttttcattctgatatatttctttttattctttatccatatgcaggcatagtctattcattctaaggcatagtggacatacggtttgctttgcctttctgtttggttatattgagaatgtttttctgggttactgtaaggtgtctcattatcatttataatggctatataatgaccctttgagtttcagtatctaaccaaaagttccaaaattggggtaatgattatttattttgaattcttaaaaaaacccagcattgtgttaggttggttacccgataacattgtacttgtcaaaaatgcttagggttctagtcatggccgaagtaaatcatttccacctattaagttgcagtgagttaattgcccagtagatgctggaggctggctttatctctaaggctgatcttgatgacttcttcccctctgagttggtgttctttggcattcttcagaaaggtcggtttgtgttatatcttaacattatgtctcagaacacatcgccactaggtggcaggc

SEQ ID NO: 732 - DNA, 669 bp, Homo sapiens; identical to SEQ ID NO: 731

SEQ ID NO: 733 - DNA, 18820 bp, Homo sapiens
tttctcccataggctgtagagggcttactaaatccacaagtggtgctgatgctaccttctgctgcgctacagggaatgccacctcttggtcctaaaagctctgcaggatggccgggcatatgggtctccatggtgcaacaaacagatcacaaggtcagtagccatcttcgaaaagtagtgagtattggactgcgactgccttttgacatagatagtactgtttatgtccaggggtttcccttttttctagtaggtaggtcggacacttagacttcctacttctgagaggtgagaattgttaagtagttgttttccatctggtctctaccttctccccatgttggatatagaaaaccagtaccttgttttggggaataaattgtaggtcattgttttaaaaggttacagtgatttctcagaagtggtattcgtgtataagtattttaatgtcttaaatggaatactctgtatcctaggatttgaaaggaaagcttgggctatctgttctatttcattactggctgtttttaaatttggacactgatttggagttgaatctcaaggcattcttagtttggagcaaatttccattgagtaaaatgggcccttttacagtatggttaagcctatatgagtaaagatattgaactttttctaggtgcctaattgaatgtcgagatgaatataaatataatgtggaggctgtggagctgctaattcgcaatcatttggttaatatgcagcagtatgatcttcacctagcgcaggtatggaaggaatttacttgcacggacaaaaggactcagggaagtacgtttgctcttaagtgttttccctctcacattatgttttctgtgttgccagtcaatggagaatggcttaaactacatggctgtggcatttgctatgcagttagtaaaaatcctgctggtggatgaaaggagtgttgctcatgttactgaggcagatctgttccacaccattgaaaccctcatgaggattaatgctcattccagaggcaatgctccagaagggtgaggatgaaatgctttgagatccctgtgcatttagtagtcttctaatatctttaggaatgaatatgcagacttactaacattacttgttataactgctttaccaaccacatatgggtgggtagctttggtaagggctaatattgtcacttgaagtatgaaagcctaattgactgccaagtcttcttggcacagagcagtacatacggtaccagacttagtgtcagagtcctatgtttaagccctggtcatgccacttaaaagctttctgattttaggcaaattgacttatcctccttaaacctattctttatagaaaaatggaacataatttctcaaagaactattggaaatcaagagaagtaacgtaaagaaagcatggtacatagtaggcaaacagtgaatatttgtcgactctgaacatcagtttcatttaaatgaacacgttttttgggcaagaagtagcttaactgagggcagttgtttgtgtgttgtatgctcatgagcaagcggataagagactaagtatagttttgtttcagtgtggaagtggtaaagcgaagtggtaaaccactctggtggttgctgttaaataagcaaactatacatgcgtatgtctgtaaaatcacaactacgaggagactgattttcaccctttatttattgtgctagattgccccagctgatggaagtagtgcgatccaactatgaagcaatgattgatcgtgctcatggaggcccaaactttatgatgcattctgggatctctcaagcctcagagtatgatgaccctccaggcctgagggagaaggcagagtatcttctgagggaatgggtgaatctctaccattcagcagcagctggccgcgacagtaccaaagctttctctgcatttgttggacaggtagagcttttggaaagaaaggtgctttttattcaacataagtagggtgtgatgcctccaatattaaagctcagtattgcgtacatgtggtcagacagttacctccatactcatgcaaacccaaactgtcatcattatatggttaaattacagcctgttttctcatggttgatcactaagcagtaaaggcaacattccctcccaccgttggttctgtatattccatttcagttgtcacagctacaaagtacaatgggtcagataatgaataataaaactaccaaatgtatttttactagcactgatgggactgtgggctaataaatatgtaaaattctcacagtagcccacattaaaaaaaaatgacaaaacaaaaatgcttatttaaatggtagagtgttttattgtattttctaatttaaatatctacctaaacgtagtgacatgttcctttggaaaatacttcccagtattttcattagatttgatgcaagttggactttgacttaaaagggttaggaacaaagcacctaactgaaaatcaagtttggcaggaatgtttgtgaataggatgaacaggaaaaatgtcggaaccgagccatagtaccatttagcattcgttttttattatcactggttgctttcagcgactgtgagggaatcagacacaataagtccatgtgtcctaatttataatataacttggcaagagtggtacttttcctgaattgaccttggaatttcctttattagaactgttgtaattttttttcagggtgagttgtctgcttatttctgcagattgaccattatatttcttcaaactgaacccaaaacttttaggtatattgctaaagaaagattacaaattaggtctcttttcaaattaatgacaattgaatgtggaagaactgacttcaattctagaagttatttgaaactaggtttacttttcagccaggtgctgtggctcacgcctgtaatcccagcactttgggaggccgaggcaggcggatcacgaggtcaggatatcgagaccatcctggctaacacagtgaaaccctgtctctactaaaaatacaaaaaaattagccgggtgtggtggcgggtgcctgtagtcccagctactcgggaggctgaggcagaagaatggcgtgaacccaggagatgaagcttacagtgagccgagattgcaccactgcactccagcctgggcgacagagcgaggctccgtctcaaaaaaaattaaaaaaaaaaaagaaattaggtttacttttcaaaatgaatgttactcagtaaatcataccgagtatatttctcccctaaaagaatccagggaattacaaagcataccctactgaaaagctattactgcatgttttatagtctgatttataatttgaatggaagaaattggaatccattggtctttctgatcattgctatttcgtgggtatggatgtggcacctgtctcagcccttcctgctggcttatttgctctcatttcatctttctcttgaaaaagatagtgtattatacttttctgtgctgttttgtatccttttgaaaattctttccttcttgcgctcctccttgaccatagtactcagtcctaatattcctcactctctgttagttttacagataccagtgtagacaaaaagtccctttgccatgctggcattctgtcccagcagggtacagtattatcgtagtccaaccagttcagttgtctttactgcttatcaggaacagttaagttgtttcaaaaatttcaagataaccttgaagttttttttttcggaacttggtttctgtgtttagtaagtagtgaactgttcttcctctgtagccttaatgcatattttactgttgtctttttttgtttgtttgtttaaagggttgaggggaactagccaaataacattcccactgtgcttcacttctagttcatatgtcatatagtttctaatttttcctttcttttaaataaacttgtgtttcccacattattttaacttaatgtaacattttattacattaaaatacctagatcagatttgtatttccatttggtacttacctgttgtacaaattattgatttttctgggggtagcttgttggagttttaaaatctttgttattggttaattcagtttgaggaaattatcttcaaatccttcagaagtaaattaccttaaattctgtgagaaagtaaaatatgtgcaatttagtcttctccttggagtccacaatgtcttaacatgacttacagttaacgaacagtttgttttatttgcatggttaatttttcacattatttggtggggacctactgttcaaaattgccatgataatctgtctgtcagtttccatcttccctgttctacattaaacttaaaactggaggaattctgtcatggcaccttaatgggaaaataattctgataatacatttattacaatgtaagaattagaaatatgacagtaggaacaaatgagaatatctcttaagcctgaaaattaaaggtatatgaagtttatttgtgtgtgttacctcattgtgtctttattttttgttcctgttgtagatgcaccagcaaggaatactgaagaccgatgatctcataacaaggttctttcgtctgtgtactgaaatgtgtgttgaaatcagttaccgtgctcaggctgagcagcagcacaatcctgctgccaatcccaccatgatccgagccaagtgctatcacaacctggatgcctttgttcgactcattgcactgctcgtgaaacactcaggggaggccaccaacactgtcacaaagattaatctgctgaacaaggtctgaaatcctttcttgccttagtcttggtctacatcagtggggtgttttatttatttatttattattattattttttatattgtttctttgagagagtctcactctgtcacccaggctggagtgcctccgaagtagctgggaatacaggcatgagccacgattcctggagcttttctatttttagtagagtcttaccatgttgcccaagctggtctcaaacttctggcctcgagtgatccacctgccttggcttcccgtagtgctgggattacaggcatgaaccaccatgcctggccacatcagtggtttctttttatttgagatggagtctcgctctgtcgcccagactggagtgcagtggtgcaatctcggcttactgcaaactccgcctcctaggttcacaccgttctcctacctcagcctcgtgagtagctgggactacaggcacttgccaacatgcccggctaatttttcttgtattttttgttttgtttgttttctgttgttttgagacggagtctcactctgtcacccaggctggagtgcagtggcgggatctcagctcctgcaagctccgcctcccagattcacgccattctcctgcctcagcctcccgagtagctgggactacaggcacccgccaccgcgcccggctaattttttatatttttagtagagacagggtttcaccatgttagccaggatggtctcgctctcccaaccttgtgatccgcctgcctcagcctcccaaagtgctgggattataggcgtgagccacagcgcccggccacgtcagtggttcttaaccctattgggtccctcaagtgacccgcctgcctcgacttcccaaagtgctgggattacaggcatgagccaccatgcctggccacataagtggttcttaaccctattgaggccaacccttcccccaaacattttgttaatgtctcttttctgtcctgaaattaaatttgtaaataatatgtaaacatacccgctctgtcttagaatatagtgccttaaccgaaatacaaaaagagatcataatgtatttcagtatgttaatgcttggtagtatgaatttgccccatatacagaatcactgtgagtgggtggctagacgtgcctcctgctgatagattggcaactcaagtacatgagtgatattagtcattggcttgatttacacagtggagttcctggaaatttgaatattaaaacaatgcaaaaatacttgtaaaaatggactgtgattttggatttgggaaattagagatgtgttcttcaagcccctcactgttcagtgggcaagtcaagtggaatgggatctctgcagcctaacagctttcctggcccctgcctactaaatgccaagataggagtaaatcattcccacatgtcaacttcatgtcagaccagacaaattagattgttatattgtgttaacatggtgaaatgtgaggggccttgctgatttctagagctgaagaagaaccattgggcatttgtggagaatattcaggtgtggtccaaggatgttgaaatgcaaagaaacacacaaaacactgaaggcggagtcagaccaatttatgaccctatcggctgccagcatgtaattttgtattcaaattgtatatatgctttcctttaatgttgggtttaagaatgcaaagtttaaaaagcatgacatcgaagtggtgagtggattatctgaatgatttacaagctctgatttgtgttttacgtaggtccttggtatagtagtgggagttctccttcaggatcatgatgttcgtcagagtgaatttcagcaacttccctaccatcgaatttttatcatgcttctcttggaactcaatgcacctgagcatgtgttggaaaccattaatttccagacacttacagctttctggtgagtattgtgtttgcgattttgtgttaaggtttgctggattaatgtagtaaaattttgggagtagaactcttgagcattttgagcctacattcatgtgctgttcactgtatttaagttggactgtgcttctgactaaggtttttcttctttcagcaatacattccacatcttgaggcctaccaaagctcctggctttgtatatgcctggcttgaactgatttcccatcggatatttattgcaagaatgctggcacatacgccacagcagaaggtgtggctgcagtttatctcctgtagatgaagactataactacctgggcttatttattagcattgcctatagatttctattagtcatttagtagtaattgtacttcttccaaacttagttgggaatgctatttagtgttcactcaagtcaattacttgactgcctctgcctgaaagccattcctcagtgattaggtgttgctgcttcaactcagttgtgggccacctgtgtcagtctctcaagtttttttttattgttttttcctttctttcttttaaaatgttttgcttctttatatacaggaatgatttattttacatatttgtcagttaagggtttttttgggggtaggggtgttgtttttaaagttgaaatccatgtgtgccctcataaatatctgaataaatctctgggtaacagggctctggagcttgttggttttacagactctcactttaaatgcggaaggctctcaaactaaggttgaggactactggctatgttattttgaaggattatgatcaagttctatttaagagttcattatctaattggtaatacaacacagttaacatgataagtttttttcctcccatcttggaattaaattggcaaatgagtactgcagaaagtaccattctttggcccctcagatcagaagaaatgtgactgctatgtaatggagtgaacttgacaaagaaggtgaaatagctcttaaatgaagttttgtttggtggagaagggcattctaggaggaaggaacacaacatattaaatgcaattatccaagaattaattgaacataattggtatagttgggggagggtgagcaggctgacattggctgaaaatagagaattcatgtcgtggactgaacaaggttatttgcgaagagttgagctggaagagagaaaggaaatggctgagacttaataaggaattaagaaaacacatttctagttgtcagtttctgcagttgactgttttgtgttctctcggaagtttactcctctccctttttaaattttgctacaggtacacagggaccattatgtcttgaaatctctggagccagtttttttcaaatattatttcccactatctccataataacttggtcctttttaatctttttaatgccagtcttttttcttttcttttctttttttttttttgatggagttttgctcttgttgtccaggctggagtgcagtgccacgacctcggctcactgcaacctctgcctcccaggttgaagcaattctcgtgcctcagcctccagagtagctgggattataggtgcccgccacctcgcctggctaattttttgtattcttagttgagacaggatttcaatatgttggccaggctggtctcgaactcctgacttcaagtgatccactggccttggcctcccagagtgctgggattacaggcgtcagccaccgtgcctggcctttaatgccgatcttttgtaaaagtacttaacattagtattctctacttatattagcatgaagaagataagtcagtgtagctgcttgggcgacttgtagtggctgaaaaacagctgagtataattatgactcatgtacatttctttctttcaggggtggcctatgtatgcacagctactgattgatttattcaaatatttagcgcctttccttagaaatgtggaactcaccaaacctatgcaaatcctctacaaggtaattaacttggatttattataaattaaaataactgagatcttaagaaaatacactttaggaatctgaggccttattttgtttttattaagcctttgaggcatgatatacattcagaaaagtgtaaaaatcaagtgtacttgcataactagcacccaaattgtacagtgtttgtatatgttcaactgtagaagatactacagttttacaaagcgtttgtaccagtttatacttgtaaacagcttggaggagttactggttttcccccatcttcatcttgccatacctggtattatctgtttttcattttaaccattttggcagttgtactgtgagatctcattgtggatggaattttgtttgttggtgatttatctttttttttttttttttttttttttttttgagacagagtctcactctgaaacccaggctggagtgcagtggcgcgatctcagcttactgcaacctccacctcccaggttcaagtgattcttgtgcctcagtctccctagtagcagagactacaggcatgtgccaccatgcctggctaattttttgtatttttagtatacatgggggatctcattacattggctacgctcgtctcaaactcctgaccttaagtgatcagtctgcctcagcctcctgaagtgctgagattacaggcgtgagccactgcacccaccctccttgatgacttcttaatgaggttttcatgtgtagatcagccatggatatcacctttttgtgatgctcctcttccagtcttttggctcttgtttgtatttttatttattaaataattctttatatgttttaaatacaagccctttgttgttactatatattcaaacatctcccactctcacagcttgcccttttactcccttaaaggaagggggaggtgtcttttgaggatcagaagctttaaaatttattgtagtcaaaattgcagatttttaaacttatattaaaagttgctttttgtgacttgtgtaggaaatctttgcgtgtctcagtgtgctaaggtgttctatttccactgatctgaattgtcagatttatgagcataaagtcgtttaatgttctgaaactattttttatgactgtaggatctgtaatgtcattcctgacattaataatttttgtgttttctctgtcagccttggttagggtttatcaatttattttttctaataactaacttgggccctgattttctcccttttcagtactttaaaaaatttattatatgcttttactctactttctttggttttcattagttcttttttttttttagcttctgaagatagacgcttacatcattgtatttttattttttgtccagtctcctcttctagcatattcatttcagcctgtaaactcttgatgcctagtttttcatgatacctaaatggaaatatttgataaatcatctgtgataatgttaattaaagcctaaaactttttaagaaatgttactaaagtatacttcattcttttgaggggggtggggggcttaagttacaataggaaaatgttactccattttccttagtgtggaaatatttttcttgttttttaaaaatagggcactttaagagtgctgctggttcttttgcatgatttcccagagttcctttgtgattaccattatgggttctgtgatgtgatcccacctaattgtatccagttaagaaatttgatcctgagtgcctttccaagaaacatgaggctccccgacccattcactcctaatctaaaggtaaggttccaactagttaaaggaaaacttatgtcttaatatttcagtcctttctctgataagtagactgttcagcactttcctacccaacataacacgcacactattagttaagggtactctttaaaggaaataatgttattaagcctgatagaaggtatgatattgttgctattgctgttgctggtgaatattggttcacagcatttttctagttgctagttttcatattaattttgatattaaatttagctctatttacagaaccacagcttaggtgttggggcagtcatttgctgggtgtgccccacatggcaaagaattgcagaacaaacagacctttgtaatctttttctttttttgaggcagagtcttactctgtgacccaggctggagtgcagtggtgcagtctcggcttactgcaacctccccttcgctggttcaagctattctcccgcctcagcctcccaagtagctgggattacaggcactcgccaccacacctggctaattatgtgtttagtggagatggggtttcgccatgtcagccaggttggttttgagctcctcacctcaagtaatctgcctgcttcggcctcccaaagtgctgggattacaggtgtgagccaccacgccctgccatagtctccatatttcacagttttgtgtctgtgcacttgtgcagttgttccttggtcccttgctattcttggaggattggttctaggacccactgggacaccaaattttaagtatgcttaagtcctgtatgtaaagtggcatataacctttgcatatccccttaaatgacatctgtagtgcttatgatacctaatgtagtgtaatgctattatggaaataactattttaaactatattaataactttttaaaatttgtgttttttattgttgtattattatttatttgtatttatttatttatttttgagacagagtctcactctgtcacccaggctggagtgcagtggcgcaatctcagctcactgcaacttccgcctcctggggtccagtgattctcctgcctcagcctcccaagtagctggtactacaggtgccctgccaccatgcctggctaatttttttttttgtatttttagtagtgacggggtttcactagttggccaggctggtctcaaactcctgacctcacgatctgcctgccttggcctcccaaaatgctgggattacaggcatgagccactgcacccggcctttattgttgtattattttttattgaccccatcatctacctctaccttcaccccccatattttcgatttgaggttaattagatatggaacctaagggtatggagaacccactgtatttttttgtaagttgttggaataaaggagagagaggaccacttaaaatctcaccaccctgacatggctactatagtttgtttaagagacaggggtctcgttgttttgcccaggctgaagggcagtgactattcacaggtgtgaacatagtgcacttcagcctcaggctcctgtgctcaagccgtcctcctgcctcagcctccagagtagctgtgactagaggtgcacaccactagaagtgcccagctatagtttagatgtagtctctactctttctgacacatgcatttttttttttttttttttttttgagacggagtttcgttcttgttgcccaggctggagcgcaatggcgcgagctgtggctcactgcaacctctgcctcctgggttcaggcgattctcctgcctcagactcccgagcagctgggattacaggcaccacacccagctaattttatatttttagtagagatggggtttctccatgttggtcagggtggtcttgaactcccaacctcaggtgatccgcctacctcggcctcccaaagtgctgggtttacaggcgtgagccactgcgcccggcttcaattttttttttttttttttttttttttaaggagtaagtgtgatgtctggtcttgctggggcttcttttcaaagactcttggtgagtgaggaatcttattccggattattattttgaaaccgaagtccaagaaaaatcagttagttgtgcaaattagacctttgcccaaaaggtatcttgcctctgggaaggaaatacattatagagtgggaaatttttatcattttgaaccagattctttaaagaaagaaagactgattaataaaatgtggcagctgtgctcttcaaggcatttatagtgtatatagttttagaaaaacagtcccaccacttaagcatagatgtaatttactaataaaaatgattctgcttgtgattcttgcattttatctgtggcaggtggacatgttgagtgaaattaacattgctccccggattctcaccaatttcactggagtaatgccacctcagttcaaaaaggatttggattcctatcttaaaactcgatcaccagtcactttcctgtctgatctgcgcagcaacctacaggttaattggtttggcttaaaactcatctacgtcttccatataaagcactttctatgtatggtcctgtgtgtggtccatttgggagttagtcttttattgtcatttccatcaattgggtgaggttgattaactggatttacgtattttactagttcatttaatcagtgatattttgctacagctttggacaagacagcactagaagagtagaccacagacagtcattagctgttggtactcctaggatttttctgaatacctggatgctgatttacatttctctataggatattttggaaagttatatatttacagtctgtatatgccatgcaactacaactttctctccaaatctttaattggcacagtgcatattttgattttataaactttactttagagctgtgccttgagcttcggcttcctgagggaaatcacatttctcttattgatacaaccacctttggagcatctgtgtgtttgttaaataacctcacaaattcaagcaagtgaatcacaataaatgtttggcctttccatgaaggtgtaagaagggtttagaaatactggtgctagaattggtcctctgcaggagtaagcataaggagttctgttttgctcattttaaggtatccaatgaacctgggaatcgctacaacctccagctcatcaatgcactggtgctctatgtcgggactcaggccattgcgcacatccacaacaagggcagcacaccttcaatgagcaccatcactcactcagcacacatggatatcttccagaatttggctgtggacttggacactgagggtgagtgaagcctgccagttttcagagtagagttctctgtgctttttgctacaatctgatcacaaaaatgtaaaaatgcttcaagccacaatagtgaaggaatgttctgtcagtatatttattcacaggtctagctgattattttatctttaattggacattatctgctcagtgcaggaaatacaaaaaagcataaaggaaagaattatccagaatcgtgcagtatcagttttggtgtatgtgactgaagttttttagtgtgaaaataaacttaaagtccctttaaacatagcctcttgttacattgttttgttaggctgccttatataagcatttttattggtgcgtgtttggcaggcatcttgttaaatgttcatgtataaagattaatgaataggactctcctgttctgcaaaaagctcacagtataactcctgttgcaggttgcagcttttctgcttgagctacatttcatttggtcctctatatttatcttataaaatagagaccccagttaggtgctaactagttgtacagtcctgtccagttttgcatacatatattttagggggacactactctttaactttgctattgattcttgagagatgaattgatgttgcatatatgctgcatgcctatatgtgggatggatttaagacagcttaaattcaagatataacaaaattgaataccatcacgtccaagagctcggcaataaaaggacggcagcctttagagaaacgtgtcactgtgacagactcacaaacacgaataatgtcaagcagaggcaaacaaccaaacccaattaagataatacttattccagtgtagtttagactaatcaaaatgtgggctgggtacccttagggtgtcaagacctttttaggagggctgtgaggtcaaaacttttttttttttttttttttgcgatagagtcttgctctcacacccaggctagaaggcagtggcgcaatatcggctcaccataacttccgcctcaggggttcaagcgattctcctgcctcagcctcccgaggagctgggattacaggcacacgccaccatgcccagctaatttttatgtatttttagtagagatggggtttcaccatgttggccacgctggtcttgaacccctgacctcaagtgatccacttgcctcagcctcccaaagtgctgggattacaggcgtgagccaccgtgcccggcccaaaactgttttcatcataaaacaacatttacatttttgggtctattctgtcatgagtgtacagttgaatttctcagaggttacatgaaatatactgtaacaagttgaacacagaagcagaaatgagaatccagctgtcttttattaagcaagacttagagatctgcaaaatgtagaaagacttagtgatgagtgtcaccagaaaatagttcatgtttcttacattagcacatagtgggtctgtttttaaaaatgaatatttttaaaatctaatttctaatgtggaaaattctgaaataaaacgcacagaaatgagaactctttggggtcccaagaaccactgctttaaaccaaagattaatttgaaagcctctgtcagaaacccaaaccctagccagttagaactgtcttcccatgttggcctttcagactaagtcctaagtcaaggtttcttaatttctaggtcgctatctctttttgaatgcaattgcaaatcagctccggtacccaaatagccacactcactacttcagttgcaccatgctgtacctttttgcagaggccaatacggaagccatccaagaacagatcacaaggtaagcgagcaggcttattttttaaatgcttcaaaaggatctcctccctttcatcttttttttttcctctttatgctttcagtgttcagtgaaaatccgtttggttggttttttttttgtttttttgagacggagtgttgctctgtcactcagtctgcagtacagtggcgccatcttggctcactgcaacctccgcctcccaggttcaagcgattctcgtgccttagcctctcaagtagctgggattacaggcgcctgccaccacgcccagctaatttttgtattttagtagagacggggtttcaccatgttggccaggctgatcttgaactcctgacctcaagtgatccacccgcctcagcctcccaaagtgctgggattacaggcgtgagccactgcacccggccttcagtgaaaatcttttacatgtccaataatgtgttaaatgtgggatacaattgtgagcaaaatggatggttcctgccctcttaatactcattctgatggacatttatcacaagatagggaattataaatcgcaatcatggcttaaatgaaaagtagtttaccacaaggcacattttgattaaaggtcaggagtttctctgaggtggtggtgataaccagtcctaaatcatgcaggcctatgaagtctatgttaaggaacttggacttttcctcattacctcgtgggttgaaagcagtagcaataacaggatcatactgcattttcctaacaatagttaggaatctgttgccagattgcctagactacatatagcattagagagattgtgatacacacacacacacactttaaaaattgggccagactcttaaaacttgctcatttgcctaattagtcacctatggtgctaaagtatggtattcctttgatttgtgtactaaaatttaatatcttattggatgcttagatgatgatgatccattttgtttatataaagctgcagtaagtctccttggacttgtaatctttgttatgcttcatgtacagcttggtacgtgaaaggatataaagttaagccaatgcttactgtgcattcggcaaaacttttcaccaagtttacactgtgacactcagcaactgttacgcttttttttttttttttttttttttttttttgagacagtctcgctttgtcgcctcctgagtagctgggattacaggcacctgccaccacgtccggctaattttttgtatttttagtagagacggggtttcaccatcttggccaggctggtcttgaactcccgacctcgtgatccacccgtcttggcctcccagagtgctgggattacaggcgtgagtcactgtgcccagcctgcagtgttagaatacttaattcttattttctgtttcctttttattgagagtgagcttatttatttatttaatttatctgtttatttgagacagggtctcactctgtctcccaggctggagtgcagtggcaccatctcggctcaccacaacctccacctactgggttcaagcgattctcctgcctcagcgtccgactgctgggattacaggcatgtggccaccatgtctgactaatttttatatttgtagcagagatggggtttcaccatgttggccaggctggtctcgaactcctgacctcaggtgatccacctgcctcggcctcccaaagtgctggattacaggcatgagccactgtgcccggcctgggagctcattctggaaattactactttttgtactaactttgtgtgccatgtactctgggctttatgtggcttcctctcccccatcaccccttattctgaacagctgtgaggtagataccattatctgcactttatataaatacttagtcttctacggctaagagcagggttcaaacccaggtattccaacctgtgctatttggagtatattaatccacctgtctttactaaaggtgaaaacttttgcatgtggttcaatagtcagggagaagttagaaaaaaagtaatggaagaataatcatgaatttgtatgcttctatacattaactagctctttctccctttttccagagttctcttggaacggttgattgtaaataggccacatccttggggtcttcttattaccttcattgagctgattaaaaacccagcgtttaagttctggaaccatgaatttgtacactgtgccccagaaatcgaaaagtgagttcaaagtaatttttaattgtctaggaatgagactggagactgaaaaccatctgtctctaggttgggtcagctgaatgagatgcaaggtattgttaggcctactctttaatcagagatttgtaactgtcttcatccttcaggttattccagtcggtcgcacagtgctgcatgggacagaagcaggcccagcaagtaatggaagggacaggtgccagttagacgaaactgcatctctgttgtacgtgtcagtctagaggtctcactgcaccgagttcataaactgactgaagaatcctttcagctcttcctgactttcccagccctttggtttgtgggtatctgccccaactactgttgggatcagcctcctgtcttatgtgggcacgttccaaagtttaaatgcatttttttgactcttggccaaaatttagaagatgctgtgaatatcattttgaacttgtgtaaatacatgaaagagaaaaccttgtctggaacttcttggctttgtgcaagctgtgtccaaggcaagtacataaactggtaccttgtaatgaagaggcagctgatgccatgcacttgtctgagggcatagctccatgtcttctgacattcctggtgtcccaaagaatagcaaaaagccagtttgaatattatgtaacttatttttttaatgtggacaggggacccttgaaaatcactaagttattaaaaatgtggatgtgctagaattggatatgtccaggaacatgggaagggctcactattggaatcccatgagtttccattttgtctctacccaaacgtattccaaagctgactgcatttgtaccatcttatttcttttggggattatacacctcagccgcctgagatgggggtcagctctttatataaagggaaaccagaccaggcgctaagcccacccctaccctcacccccccaatcctctcctgaaacttaaatacagtgggaatataggaaagggaaccaaatctcattaattaactgttctcccccattaccccactgaatgaatggccatacaggctaagctgtata

SEQ ID NO: 734 - DNA, 10377 bp, Homo sapiens
attttatctgtggcaggtggacatgttgagtgaaattaacattgctccccggattctcaccaatttcactggagtaatgccacctcagttcaaaaaggatttggattcctatcttaaaactcgatcaccagtcactttcctgtctgatctgcgcagcaacctacaggttaattggtttggcttaaaactcatctacgtcttccatataaagcactttctatgtatggtcctgtgtgtggtccatttgggagttagtcttttattgtcatttccatcaattgggtgaggttgattaactggatttacgtattttactagttcatttaatcagtgatattttgctacagctttggacaagacagcactagaagagtagaccacagacagtcattagctgttggtactcctaggatttttctgaatacctggatgctgatttacatttctctataggatattttggaaagttatatatttacagtctgtatatgccatgcaactacaactttctctccaaatctttaattggcacagtgcatattttgattttataaactttactttagagctgtgccttgagcttcggcttccttgagggaaatcacatttctcttattgatacaaccacctttggagcatctgtgtgtttgttaaataacctcacaaattcaagcaagtgaatcacaataaatgtttggcctttccatgaaggtgtaagaagggtttagaaatactggtgctagaattggtcctctgcaggagtaagcataaggagttctgttttgctcattttaaggtatccaatgaacctgggaatcgctacaacctccagctcatcaatgcactggtgctctatgtcgggactcaggccattgcgcacatccacaacaagggcagcacaccttcaatgagcaccatcactcactcagcacacatggatatcttccagaatttggctgtggacttggacactgagggtgagtgaagcctgccagttttcagagtagagttctctgtgctttttgctacaatctgatcacaaaaatgtaaaaatgcttcaagccacaataatgaaggaatgttctgtcagtatatttattcacaggtctagctgattattttatctttaattggacattatctgctcagtgcaggaaatacaaaaaagcataaaggaaagaattatccagaatcgtgcagtatcagttttggtgtatgtgactgaagttttttagtgtgaaaataaacttaaagtccctttaaacatagcctcttgttacattgttttgttaggctgccttatataagcatttttattggtgcgtgtttggcaggcatcttgttaaatgttcgtgtataaagattaatgaataggactctcctgttctgcaaaaagctcacagtataactcctgttgcaggttgcagcttttctgcttgagctacatttcatttggtcctctatatttatcttataaaatagagaccccagttaggtgctaactagttgtacagtcctgtccagttttgcatacatatattttagggggacactactctttaactttgctattgattcttgagagatgaattgatgttgcatatatgctgcatgcctatatgtgggatggatttaagacagcttaaattcaagatataacaaaattgaataccatcacgtccaagagctcggcaataaaaggacggcagcctttagagaaacgtgtcactgtgacagactcacaaacacgaataatgtcaagcagaggcaaacaaccaaacccaattaagataatacttattccagtgtagtttagactaatcaaaatgtgggctgggtacccttagggtgtcaagacctttttaggagggctgtgaggtcaaaactttttttttttttttttttttgcgatagagtcttgctctctcacccaggctagaaggcagtggcgcaatatcagctcaccataacttccgcctcaggggttcaagcgattctcctgcctcagcctcccgaggagctgggattacaggcacacgccaccatgcccagctaatttttatgtatttttagtagagatggggtttcaccatgttggccacgctggtcttgaacccctgacctcaagtgatccacttgcctcagcctcccaaagtgctgggattacaggcgtgagccaccgtgcccggcccaaaactgttttcatcataaaacaacatttacatttttgggtctattctgtcatgagtgtacagttgaacttctcagaggttacatgaaatatactgtaacaagttgaacacagaagcagaaatgagaatccagctgtcttttattaagcaagacttagagatctgcaaaatgtagaaagacttagtgatgagtgtcaccagaaaatagttcatgtttcttacattagcacatagtgggtctgtttttaaaaatgaatatttttaaaatctaatttctaatgtggaaaattctgaaataaaacgcacagaaatgagaactctttggggtcccaagaaccactgctttaaaccaaagattaatttgaaagcctctgtcagaaacccaaaccctagccagttagaactgtcttcccatgttggcctttcagactaagtcctaagtcaaggtttcttaatttctaggtcgctatctctttttgaatgcaattgcaaatcagctccggtacccaaatagccacactcactacttcagttgcaccatgctgtacctttttgcagaggccaatacggaagccatccaagaacagatcacaaggtaagcgagcagcttattttttaaatgcttcaaaaggatctcctccctttcatcttttttttttcctctttatgctttcagtgttcagtgaaaatccgtttggttggttttttttttgtttttttgagacggagtgttgctctgtcactcagtctgcagtacagtggcgccatcttggctcactgcaacctccgcctcccaggttcaagcgattctcgtgccttagcctctcaagtagctgggattacaggcgcctgccaccacgcccagctaatttttgtattttagtagagacggggtttcactatgttggccaggctgatcttgaactcctgacctcaagtgatccacccgcctcagcctcccaaagtgctgggattacaggcgtgagccactgcacccggccttcagtgaaaatcttttacatgtccaataatgtgttaaatgtgggatacaattgtgagcaaaatggatggttcctgccctcttaatactcattctgatggacatttatcacaagatagggaattataaatcgcaatcatggcttaaatgaaaagtagtttaccacaaggcacattttgattaaaggtcaggagtttctctgaggtggtggtgataaccagtcctaaatcatgcaggcctatgaagtctatgttaaggaacttggacttttcctcattacctctgggttgaaagcagtagcagtaacaggatcatacttgcattttcctaacaatagttaggaatctgttgccagattgcctagactacatatagcattagagagattgtgatacacacacacacacactttaaaaattgggccagactcttaaaacttgctcatttgcctaattaaatagtcacctatggtgctaaatatggtattcctttgatttgtgtactaaaatttaatatcttattggatgcttagatgatgatgatccattttgtttatataaagctgcagtaagtctccttggacttgtaatctttgttatgcttcatgtacagttggtacgtgaaaggatataaagttaagccaatgcttactggcattcggaaaaattttaccaatttacatgtgaactagcaatgttagcttttttttttttttgagacagtctcgctttgtcgcctcctgagtagctgggattacaggcacctgccaccacgtccggctaattttttgtatttttagtagagacggggtttcaccatcttggccaggctggtcttgaactcccgacctcgtgatccacccgtcttggcctcccagagtgctgggattacaggcgtgagtcactgtgcccagcctgcagtgttagaatacttaattcttattttctgtttcctttttattgagagtgagcttatttatttatttaatttatctgtttatttgagacagggtctcactctgtctcccaggctggagtgcagtggcaccatctcggctcaccacaacctccacctactgggttcaagcgattctcctgcctcagcgtccgactgctgggattacaggcatgtggccaccatgtctgactaatttttatatttgtagcagagatggggtttcaccatgttggccaggctggtctcgaactcctgacctcaggtgatccacctgcctcggcctcccaaagtgctggattacaggcatgagccactgtgcccggcctgggagctcattctggaaattactactttttgtactaactttgtgtgccatgtactctgggctttatgtggcttcctctcccccatcaccccttattctgaacagctgtgaggtagataccattatctgcactttatataaatacttagtcttctacggctaagagcagggttcaaacccaggtattccaacctgtgctatttggagtatattaatccacctgtctttactaaaggtgaaaacttttgcatgtggttcaatagtcagggagaagttagaaaaaaagtaatggaagaataatcatgaatttgtatgcttctatacattaactagctctttctccctttttccagagttctcttggaacggttgattgtaaataggccacatccttggggtcttcttattaccttcattgagctgattaaaaacccagcgtttaagttctggaaccatgaatttgtacactgtgccccagaaatcgaaaagtgagttcaaagtaatttttaattgtctaggaatgagactggagactgaaaaccatctgtctctaggttgggtcagctgaatgagatgcaaggtattgttaggcctactctttaatcagagatttgtaactgtcttcatccttcaggttattccagtcggtcgcacagtgctgcatgggacagaagcaggcccagcaagtaatggaagggacaggtgccagttagacgaaactgcatctctgttgtacgtgtcagtctagaggtctcactgcaccgagttcataaactgactgaagaatcctttcagctcttcctgactttcccagccctttggtttgtgggtatctgccccaactactgttgggatcagcctcctgtcttatgtgggcacgttccaaagtttaaatgcatttttttgactcttggccaaaatttagaagatgctgtgaatatcattttgaacttgtgtaatacatgaaagagaaaacctttgtctggaacttcttgggctttgtgcaagctgtgtccaaggcaagtacataaactggtaccttgtaatgaagaggcagctgatgccatgcacttgtctgagggcatagctccatgtcttctgacattcctggtgtcccaaagaatagcaaaaagccagtttgaatattatgtaacttatttttttaatgtggacaggggaccttgaaaatcactaagttattaaaaatgtggatgtgctagaattggatatgtccaggaacatgggaagggctcactattggaatcccatgagtttccattttgtctctacccaaacgtattccaaagctgactgcatttgtaccatcttatttcttttggggattatacacctcagccgcctgagatgggggtcagctctttatataaagggaaaccagaccaggcctaaagcccaccccctaccctcacccccacaatcctctcctgaaacttaaaaacagtgggaatataggaaagggaaccaaatctcattaattaattgttctcccccattaccccactgaatgaatggccatacaggctaagctgaataatgacaaagttgaaaggaccaatacagccccttttataaggattttgaatgttttgcaaatgtattggtccctgtgttgtattttgtagccttttcctgggcttcagctcccctacttcttgtatgtgtatgcatactgtagctaaccattaaagtcatgacacacacatgagtccactgtgcctttctcagtagcagcagccagtgctggtggtgaggaggaaaagtggacaatccagccctgcagaccttggggccatggggaaccaccaactaacttcttgctgaatgattgatttgattgattgattgataggtcattcctactactaagctggcatgtttaaggaaattgtatttttcttcctatttatttcaacactggacaaatgctggagcaggtttatctggttaagctgagtttaaaatacccagttttaatatccttttcccccaggtattttttttttttttaaagaaaatgagtagatacgtatttaaaaacttaacccacttaaaatttgccttacctttcatgactgtcaagttttatggccagagaggacaaaacagttcaaaattaaataattgaagtcctccttgagtgatgtcttagggtttattccctgagaggtggtttgtgccatctagactgaactttgggtaactatcgagtgccagttacacagcttattaaatccagagtcttttcaataaaggttaagtgacttcctcaaactagacttagatttaaaccaggggtctacctccaaagtctattattaaatgctgaaacacaacaagacttacttattactaccgtatgtccactggctttggttaaaactgagaacaaaacagctgtaacatgctttaagtaacaattagcagtgattcccaagtctgctgttctcaatcctaaaacacatcacccttacctgagttaatcctagcacaccaactttgctacttttcctcttggtgtttagtaagcaaaagaaagatccaaattttcctctttttcaaacatcaatgagtattagcttagaataaagttcttattgctgttccttcagggaacagggaaactgctaacttgtcagttccaacaactgatgtaagatcatcttctgaccatagcgaacctgtaaggcttgctgttccctccagctgagtttcgcatagacttccttattactgagtaaaccttggtcagtttttaagtctgtggcataggtctgcaaagtcagtagaacactgttttgaagcagctgtctccacgatgctttgagcttgggaatatttgtgatcgtcaggctgccctcttcccttttatcatctccccctccatcctggtctttaagctctctgaactcctcagcaggcatgcacagtacctagaagcaaccacagagctctttaattagatgtactgcttttgtacttctgaaatgactcaggagactaaactcatcttagcatttattaaaaatcccacatttcctctctcatcttctagctattttgctttaaatacttagattatcagcattaaatggccattttcagccgtttacctttagtgtggtggtcagctcctcttcagtcagcacctcctccctccctatcacaaaggctccctcttcccctaccatctccagtttgcataggaaatcccagcgctcgtacactaggtgcctttcagcttcagtttttgttcctgtagatgaaacagcaatgtgaaagtctcagtacacccaagggttcatttcttctttagtctgccacccagtctacaaagtcaactgctatttagcaaagctatttaacctgaggcatgggtatagacacaccatcagtgtcaaatattgagttaatgatacactcaccctgtaatgctgcctcacgaactgtcaccatctgaatgtcagctgtgtcatctgtgttgtcaggatatggttcaacaaaaccgtacatatgaatcagttgccagttagccatttgcccataagtgttgaaaatctcatggcctttaggaatgggctgagtggctaccatccgaagacaattctgaggtgaaagggagaagctggggccatgcctttcacgggccagccccatgaagattatttccacttaagaagagccttcagcaggtgtagttcagccatgactgatgctgttaactaccaaagttctacctttagttcctgttagaccctaaactgtgaaacaaaaaagggttgggctaactttaaaaggccagcttcatgtttaactgggtggatttctgcacagtcctcttcagcacttaaaaagttgctagctttaaaaacgaaattttcggccaggcgcagtggctcacacctgtaatcccagcacttagggaggtcaaagtgggcagatcacctgagatcaggagttcaagaccagcctggccaacacggagaaaccccatccctactaaaaaatacaaaaattagccgggcatggtggcaggagcctgtaattccaactactcgggaggctgaggcagggagaattgcttgaacccaggaggcggcagttgcagtgagccgagatcacgccactgcactccagcctgggcgacacagtgagactccgcctcgggggggaaaaaatggaactttcgcagatcaaagtcggaaaggaaaatggaggcaaggattaagaaataaccatacttactaatttctgatcctataaatgtgccatcttttcaggctactttttatatagaatagagctggtataaacacagctttatatcagttctaggatcgtcttagacctttggcctgtgaatgtcctcatccctccaaaacacggagactatcactgttccaggctgctatccacagagccacacacagtctgggctcactgatgtgatcagccagaaaggaatgaaacatggctatgcagaccactcaatgtctagcactaaataaatgatggtagtatagtttatcagaggattaaccacaacttactttgaggactttaaaatgtttcgcattcaaatgattctacagtaatatgcatactaaaaggacatacaggaggagctgatttcacctactcattttgtagcactagtaagagaatggagcctaagacacaatggcttgaatcatgctcaatcagtgcaccaagagaaactccactcaccgcagagtattctagattggcgttgtgattggctaagtggtttagtatgtctgcagcaggcaccatcacgggggagttgggctccttttcatcctcttcttcctccagtggttcctgaaagctgccattgacagaacctggctaaggccctgtcttgggtgagggactgggggtggatttcactgtttttccacttttgtccctctatagagttgtaaagaaaagggttccgtcctcagaggccccacccactgacctataggccatcacaagggccaccagctggtggtagagttctagggagcgaacccctgaggctgaagagatcggggtgggcttccatgaagggcagcacgatggactggtactcgctgcggatgttggccaaatccttctccacggcctcaggtacgcctgtgccctggagcaggcaccggcgctcctcctctggcctgcagggacacccacacccaggttcccttcattccttcacacactttactgggtaggactggtgcaggggcggggaaactgttcttgcagcaggctacggtgcaggcgctccccaacccctcccaaggctctcaccagaacatcgggtgctccaagcggcccagctcgggccagagcgcaaagtagggcctccagcgtgaggccggggcctgcagctcgtggagcagcgccagcagcagtggcacccagcccgactggctctgcagcgcaactcgctctgaggaagacacaggtgtgagcgccccggcgcggcctcgcgggccgggcccgaaccgccccgccccgccccgccccgccccgccccagggccctagcccgccgccgtgcccacctcgctccagcaggccgccgatggagcaggtgtgctgcgacaggagcgcggcccgcggcaccacgaacagcagctctccggcctgcacgctctcccgggccaccatgccgtagccggccaccgtgccctgccggctgaccgccacctgagcaggagggctggtcagggcagcccgcgccccgccgcgggtcctccgcccgccggctcgctcgctcaccttgggactcagctccagccccacccgccggcaccagctcaggaagcaggccacaggatccaggtcgccgccgtccacgggccccgccacctgaga

SEQ ID NO: 735 - DNA, 32191 bp, Homo sapiens
tgtgttctttttgaattttgtgcaatgtgtttgtacctattttgaaaaaataaaatgtaaagacttcttcaaggtaaaaatagcactgttgaatcataaacacagcaaaatgatattgagaatgatatacagagtaattctactttggggcctgttcttagaaatgatgacttgtctttaggataggataatggaattctcaaatacttagttgagttttctttcataagcttattctcatatctttcttaatcttacactatttcaggtgctcctgacctctgataaagctgcagccaatttctcagatcgttctttgctgaagaacttgggacattggctaggaatgatcacattagctaaaaacaaacccatcttacacactgtgagtttcatctaaatgtgtaaaaattgagaatcttcagcacattatgattacaagtattggctgtttggagctatttaatgattattggggttttgtaagattttggcccacgttttgagttgttaacccctttttgtaaggcaaggactagacattatgttgattcctgttttggggataagcttggcaaaatacttttctttggttttgttataccattttggggggtatattccccgcttttgaaagtatttttcttattctaggacttggatgtgaaatcattgctgctagaggcttatgttaaaggacaacaagaattgctctatgtagtgccctttgttgccaaagtcttagaatctagcattcgtagtgtggtagagtagattttaatattttatttatgactaatttctaagcattgctttgttttagcatgaggtcaagagattatattcttagttcttgtgaggtaaagctagttaagtctgttttcctctatggcacttggatttccaatttgagaggctagggtagaaataagaaagattataatggttggctttggtttttggttttttgttttgttttgtttttgaaatgtgatataggtgagaaggctaggggttttgttatggctacagaggtataagtgtttaactatgtttaactgtttttggttattttttaatccttgttttttgttttttatttgtttgactcccccctacccccttatgttgtattgaattgttttaaataatccaaattaaagggcacattttgggccagcttaacataatagcttttctttaggtttttaggccaccaaacccttggacaatggcaattatgaatgtattagctgagctacatcaggagcatgacttaaaggtaatttactgcttccttgtcctctggaacattctttgccttcacgttattaaaacgtacagtgaaggcagggtatttcgggggaagtactataataactgaaagtagagtatattatgagtaaaactaaagttttcttttaaaaattctaatccaactctggaactgtgcagttaaacttgaagtttgaaatcgaggttctctgcaagaaccttgcattagacatcaatgagctaaaacctggaaacctcctaaaggataaagatcgcctgaagaatttagatgagcaactctctgctccaaagaaagatgtcaagcagccagaagaactccctcccatcacaaccacaagtaagtgtgctaattagtcaaggaaggcttctgttagctaggatactatcttaaatggtacttgtccatgtatatcgcaaactataatttcccacataatgtagtggtgaaactttgtatacgttttggtgagccttctaattatcaagcagaagtaatgactaggccttgtgttaccatcttagattccatcctgacagttcatgcatattattaactaaatgtgatttaatcagttgcctctcataccccagctaggccaggttatctcctttgttgtgtgaagtcccagaaataactgcatactatgatggcctgttaacccctcaaatctgggtgtggccagacctgctagatctgccaagggaatgggactgttttatctacatgaagaagatgggagaagggtatgggagtgttgaatgattgggagttgtggttagaataaattgagcttttctttctttctcagtcctcagcagctgagaatccccagataaacctaggaacaggctaggttgaaaacatacatttataatatagactaagtttataggacttgggcctgacaatatggcatggctgctcagttgatttctgtgctgtggggcactggcactgacatagttaacatacttcgtgtatatctctgttataacaacagaatttccctttcagggtgggaaaaataggacctgctacatccttccctcctctcccaatttaattcgtttaattagataatgaccacttaatgatattaagctaattttataataagagtcaacaaatgtactttttaaatctctttttattacttgacatttagcaacttctactacaccagctaccaacagcacttgtacagccacggttccaccacagccacagtacagctaccacgacatcaatgtctattcccttgcgggcttggtaccacacattactctaaatccaacagtaagtaaacactgctccattctcccagcttctagtttgtgataaggtaaattttgtttggccaccttttcttcagctctttgcccttccctctggattcctaggtggtagagtttgtcagagaggatggagatctagaactgctgtgtagttcagttgggattgttcttcttcccttaagagatagagtgactagatgttagttatattggttcctcatatccaaacccatgatactaaaatttagctagcaataaaatcacaatctccaggaattccttacacagagtaaaagatgcttaatgtatatcatagctttttattttctttatcttgtcactttagccttctgcagtaagccatttcttccacctgaaggctggaaatgagctgattgtgggtgtgtatacaatttctaggctaagatcttgaagtaggacttagcactttgagttatgttgttgtggcctggttccagaaggaggtctgatacaatatggtcatgtaagatgacctctgatcagtcctttttcctatagttagtatttgctttgtacattcaaggggacattttattgttatctttagtcttttattctacttaacagaatatataatacagaatcaggtgagtggagttttcattgtccttactttttagaaactgaaaatgttcacaaatacaagagtaacattaatacattgaactttttattaaaaggaattgaaagggtatcagagaaatcattttatccttgtccccccatccccactcctatagacatggtacttagttttagaggggtggagtgagaggcagtgggacacctagatccagaaattgtgattcatctttagaatactcttagtgttgtgaacactattatatgctagtttaatttttttttttttaattcaacaagttaaagggaccaagtaagttttggggcataatttacacctgcaataaaagattagaaacagcctttcaaatgaagccagatacttcagtgggcactgtaaaatgctcactattctgatgaattaattttaatagtttttgtaagaagtcttttttctataaactttattctttttacattttcccaagctagtggagaagttgctttcttttaagagcacttgagccacaaattttaaataagccagcaatgtgtctttaagtagttaatgcatattgtaatgaacagtttgtccattaaacttggatttaaaaaaaagacatatctattattgtgtatcacagggtatactgaatacatttccctgtatggagctcagtttctgttacccgaattttccattggttaactttaagtagaaactggtagtttttggttaatcttgatttacaaaatcatgaatgtgattgccagtaggaattggattgtcttatttaaacaaggtgttgactttgtcctccccaaccccccagattcccttgtttcaggcccatccacagttgaagcagtgtgtgcgtcaggcaattgaacgggctgtccaggagctggtccatcctgtggtggatcgatcaattaagattgccatgactacttgtgagcaaatagtcaggaaggattttgccctggattcggaggaatctcgaatgcgaatagcagctcatcacatgatgcgtaacttgacagctggaatggctatgattacatgcagggaacctttgctcatgagcatatctaccaacttaaaaaacagttttgcctcagcccttcgtgtaagttggctatttccttggtataggtacaaaacgtattactgcttgtctgtaataatttttttctttgtctatatatggcactgggcattaccacttattcttaataatcaccatatttgtttgatgtcttccatcattttagattgtaattctgtgaggcaaagcatcatgtctgtgtgttttttttttttctgttatattctcaacacgatgtttgacagatagtagatacccaaatatttgttggtttaaataaattaagatttaaaaaggaaatgtgatatctgacaatctcatttctgttaaccaggaaggatgaaagctgtttgagaaggccgatacaaaatgacttaaagtgatgttgcatgggcacacacttttcaaataattcacttactagttttgagtctcagatatcatggttaataattcaggtatcatgattaataatttgtttactgctttaatgattttttttggttgttttttgccttttttttaatgtttcatgagacagggtctcactctgtagcttaggctagagtacagtggtgcagtcttggctcactgcatcctccacctctgaggttcaactgattctcgtgcttcagcctcccaagtagctgggattacaggcatgtgctaccacgccccactaatttatgtatttttttagtagagaagtggcttcaccatgttggctaggctggtctcaaactcctggcctcaagtgatctacctgccttggcctcccaaagtgctgggattagaggtgtgagccaccgcgtctggcctgctttactgattttaaggcatgttcacaataaactgataaggtgtctaggatatttttgtcttaaaagtgaggaagctgttaagactgtttcaagatcacagcttgttcataagtagagtcagaacttaaaatgcatttgccaaatgcactgcattttctactatcctgtctgtccacatcaactttcaagtctttttccttctattccccccacccccccacccacctccattaatagactgcttccccactaacaaagagaaatgatggatcaggcagctgctcaattagctcaggacaattgtgagttggcttgctgttttattcagaagactgcagtagaaaaagcaggccctgagatggacaagagattagcaactgtaagtgtttagaatttgccttttaagattttcttttttaatttagggaagtgccttataacaagaacctcagtgactttttttgtttgcaggaatttgagctgagaaaacatgctaggcaagaaggacgcagatactgtgatcctgttgttttaacatatcaagctgaacggatgccagagcaaatcaggctgaaagtgagaattggggctctgtctttccccgtcccatctttgttttatttttaatgttgttgttgattgaactccttactggaattaggacagcagggttaaatattgtttatgagaaaacatcttaacttgatagcatttcactgaatggctgcctgtggaggaggtatggaaatagctctaaattcccttgctcctccagagttgttgaagtgttattactctaaggagttcatgtgcctgctagttttcatgtttcccaacttgggcttctcacattaatggttgcttattgttcccagtgagacagtgagaaatctgataatatttaccagcttcaagggagaattgcactggcatcgtcccatgtgaggcattttccaagagaaactctcagttaatttataaatgaggtgactcttagcaggattcagggaaatgagaagccctcttctgaactgcatttgtgtgtgcgtgcatgcttaatcatgctgttatatgttgtaatgactcttgtgtccctgagcttacccacatgcagactttccactttcaaaacagtttattttgattattgagtgaattctgtcaaaataggttttcttctttcaaggttggtggtgtggacccaaagcagttggctgtttacgaagagtttgcacgcaatgttcctggcttcttacctacaaatgacttaagtcagcccacgggatttttagcccagcccatgaaggtaaatgtgttttagattaaattgagtgttttgccaattaatttaaatgtttttgacatttaatatatgtttttgacttgcttcctgggagaataatttacaggggaaaaaacacctatagtttttgagttgtaggtattctttgtgtccaattaagtatgacatacaggggattaaagaaaaattgacatgggtgtgggtgatttaactttaatgttcggcctaattaggggaattctcatggtaacataataactttcggttttttatttttaaattttattatttatttttttgagacagggtctttctctgtcacccaggctggagtgcagtggcgcgatctcagctcattgcaacctccacctcccagactcaagcgatcctcccacctcagcctcctgaggagctaggactacaggcgtgtgccaccatgctcagctaatttttgtattttttgtaaagatggggttttgccatgttgcctagactagactcaaactgctgacctcaagtgatcgcctaccttggcctcccaaagtgctgggattacaggcctgagccattgtgcccagccttcccattttttaaataaaagaattttctaaaattttcaaaggtgtttacagaaaacttggaaatatagggaaaaatattttcccccgaaccggtcgatagtaagttgctgacctgatacccccatcgctcctgaatcctttggtttgtatttcttacaaaacctttttcctttggtttgtatttcttaaaaaacccttttcctgtgtgaccatggtacaaccattaaggtcagaaatgaatactaataaccttactccatctaattcatagacctcactcgagtttcaccatgtatcccaataatgtatagtaaaagacctgttttagaatcacacatttcttcagttgtcatatttttaaagtctccctcagttctagctggtgtaggtaactcagtttttcctcatctttcatgaccataacacttctgaatattataggctaattattttctaaatgacttgatttgtttgtccagtgtattctcatgactaggttcaggtaatgtgtttttaaaaataggaatagctcagaagtaatgctgtattcttactctatcctatcaggctttggcagttggactgagtactgtatttttcatggtttgaaacacttactttcttaggatatagagggcttagtagatggtacaagtggtgctgccctcagtctgtctcattgttactaatgctctcttttatcacttgattatgctgctgtctgccaggttttcctctctcaaatgaaacacctcttcccttatgcctgccttgtactgtgccacttgatggtattaattctgaatagctcaggaagaaggaaaagaagaggccctccatgtttgaatgtaaaaataagaaaaagggagtaaacatactaatagacctctatttgatacatgtgtcaataaaaaaccttaacatttttttgtctcttgttggttgtttccttctgtaaaacagcaagcttgggcaacagatgatgtagctcagatttatgataagtgtattacagaactggagcaacatctacatgccatcccaccaactttggccatgaaccctcaagctcaggctcttcgaagtctcttggaggttgtagttttatctcgaaactctcgggatgccatagctgctcttggattgctccaaaaggttggttcttaagctattacttttagaaaatgctaggtgtgtaaacatttattgacctgcaccaccatctacatatttatgcagttatgcttaagatttcataatataaatcaagttctgtaagtaggtgatttttttttttttccaacgtagaatgtagtcatggcagttttgaatggtaaacttggaaatcttcattttttttcttaaagatattctggaaatgtgatttgaagaaactttaaaaggtagccctttagaggggtgtgtgtgtctgtgtgtgtgtgtctgtgtgtgtgtgtgtgtgtgtgtgtgtgtgtgtgtaagagacagggtctctctctgtcaggcttgagtgcagtgatgtgatcatgggcttaagtgaacctcccacatcaccttctcgagtagctggtattacaggtgctcactgccaagccaagctaatttttaatttttttgtagagacaggtcttgctttgttgtccaggtcgttctcaatctcctgggctcaagtggccctccctcctgagcctcccaaagcgctgggattatagacatgagccactgagcccagctgccctttagattttgagggacaagttgatccaataatttggatcagggtaggtagggagccctggattttaactacagcagagccttttatgacaatgaagagcacagaatgaacttaaatcagatagaatttagagtgtgtgtgataggcaactgaaagggatgtttggagagtggaaaggacagggaggctttggaaggtatttggtacttggcattgagatttggtttctggctgtgatagttgggccaagcactgtatttttcatggttttgaacgctttctttctcccataggctgtagagggcttactagatgccacaagtggtgctgatgctgaccttctgctgcgctacagggaatgccacctcttggtcctaaaagctctgcaggatggccgggcatatgggtctccatggtgcaacaaacagatcacaaggtcagtagccatcttcgaaaagtagtgagtattggactgcgactgccttttgacatagatagtactgtttatgtccaggggtttcccttttttctagtaggtaggtcggacacttagacttcctacttctgagaggtgagaattgttaagtagttgttttccatctggtctctaccttctccccatgttggatatagaaaaccagtaccttgttttggggaataaattgtaggtcattgttttaaaaggttacagtgatttctcagaagtggtattcgtgtataagtattttaatgtcttaaatggaatactctgtatcctaggatttgaaaggaaagcttgggctatctgttctatttcattactggctgtttttaaatttggacactgatttggagttgaatctcaaggcattcttagtttggagcaaatttccattgagtaaaatgggcccttttacagtatggttaagcctatatgagtaaagatattgaactttttctaggtgcctaattgaatgtcgagatgaatataaatataatgtggaggctgtggagctgctaattcgcaatcatttggttaatatgcagcagtatgatcttcacctagcgcaggtatggaaggaatttacttgcacggacaaaaggactcagggaagtacgtttgctcttaagtgttttccctctcacattatgttttctgtgttgccagtcaatggagaatggcttaaactacatggctgtggcatttgctatgcagttagtaaaaatcctgctggtggatgaaaggagtgttgctcatgttactgaggcagatctgttccacaccattgaaaccctcatgaggattaatgctcattccagaggcaatgctccagaagggtgaggatgaaatgctttgagatccctgtgcatttagtagtcttctaatatctttaggaatgaatatgcagacttactaacattacttgttataactgctttaccaaccacatatgggtgggtagctttggtaagggctaatattgtcacttgaagtatgaaagcctaattgactgccaagtcttcttggcacagagcagtacatacggtaccagacttagtgtcagagtcctatgtttaagccctggtcatgccacttaaaagctttctgattttaggcaaattgacttatcctccttaaacctattctttatagaaaatggaaataatttctcaaagaactattggaaatcaagagaagtaacgtaaagaaagcatggtacatagtaggcaaacagtgaatatttgtcgactctgaacatcagtttcatttaaatgaacacgttttttgggcaagaagtagcttaactgagggcagttgtttgcgtgttgtatgctcatgagcaagcggataagagactaagtatagttttgtttcagtgtggaagtggtaaagcgaagtggtaaaccactctggtggttgctgttaaataagcaaactatacgtgcatatgtctgtaaaatcacaactacgaggagactgattttcaccctttatttattgtgctagattgccccagctgatggaagtagtgcgatccaactatgaagcaatgattgatcgtgctcatggaggcccaaactttatgatgcattctgggatctctcaagcctcagagtatgatgaccctccaggcctgagggagaaggcagagtatcttctgagggaatgggtgaatctctaccattcagcagcagctggccgcgacagtaccaaagctttctctgcatttgttggacaggtagagcttttggaaagaaaggtgctttttattcaacataagtagggtgtgatgcctccaatattaaagctcagtattgcgtacatgtggtcagacagttacctccatactcatgcaaacccaaactgtcatcattatatggttaaattacagcctgttttctcatggttgatcactaagcagtaaaggcaacattccctcccaccgttggttctgtatattccatttcagttgtcacagctacaaagtacaatgggtcagataatgaataataaaactaccaaatgtatttttactagcactgatgggactgtgggctaataaatatgtaaaattctcacagtagcccacattaaaaaaaaatgacaaaacaaaaatgcttatttaaatggtagagtgttttattgtattttctaatttaaatatctacctaaacgtagtgacatgttcctttggaaaatacttcccagtattttcattagatttgatgcaagttggactttgacttaaaagggttaggaacaaagcacctaactgaaaatcaagtttggcaggaatgtttgtgaataggatgaacaggaaaaatgtcggaaccgagccatagtaccatttagcattcgttttttattatcactggttgctttcagcgactgtgagggaatcagacacaataagtccatgtgtcctaatttataatataacttggcaagagtggtacttttcctgaattgaccttggaatttcctttattagaactgttgtaattttttttcagggtgagttgtctgcttatttctgcagattgaccattatatttcttcaaactgaacccaaaacttttaggtatattgctaaagaaagattacaaattaggtctcttttcaaattaatgacaattgaatgtggaagaactgacttcaattctagaagttatttgaaactaggtttacttttcagccaggtgctgtggctcacgcctgtaatcgcagcactttgggaggccgaggcaggcggatcacgaggtcaggatatcgagaccatcctggctaacacagtgaaaccctgtctctactaaaaatacaaaaaaattagccgggtgtggtggcgggtgcctgtagtcccagctactcgggaggctgaggcagaagaatggcgtgaacccaggagatgaagcttacagtgagccgagattgcaccactgcactccagcctgggcgacagagcgaggctccgtctcaaaaaaaattaaaaaaaaaaaagaaattaggtttacttttcaaaatgaatgttactcagtaaatcataccgagtatatttctcccctaaaagaatccagggaattacaaagcataccctactgaaaagctattactgcatgttttatagtctgatttataatttgaatggaagaaattggaatccattggtctttctgatcattgctatttcgtgggtatggatgtggcacctgtctcagcccttcctgctggcttatttgctctcatttcatctttctcttgaaaaagatagtgtattatacttttctgtgctgttttgtatccttttgaaaattctttccttcttgcgctcctccttgaccatagtactcagtcctaatattcctcactctctgttagttttacagataccagtgtagacaaaaagtccctttgccatgctggcattctgtcccagcagggtacagtattatcgtagtccaaccagttcagttgtctttactgcttatcaggaacagttaagttgtttcaaaaatttcaagataaccttgaagttttttttttcggaacttggtttctgtgtttagtaagtagtgaactgttcttcctctgtagccttaatgcatattttactgttgtctttttttgtttgtttgtttaaagggttgaggggaactagccaaataacattcccactgtgcttcacttctagttcatatgtcatatagtttctaatttttcctttcttttaaataaacttgtgtttcccacattattttaacttaatgtaacattttattacattaaaatacctagatcagatttgtatttccatttggtacttacctgttgtacaaattattgatttttctgggggtagcttgttggagttttaaaatctttgttattggttaattcagtttgaggaaattatcttcaaatccttcagaagtaaattaccttaaattctgtgagaaagtaaaatatgtgcaatttagtcttctccttggagtccacaatgtcttaacatgacttacagttaacgaacagtttgttttatttgcatggttaatttttcacattatttggtggggacctactgttcaaaattgccatgataatctgtctgtcagtttccatcttccctgttctacattaaacttaaaactggaggaattctgtcatggcaccttaatgggaaaataattctgataatacatttattacaatgtaagaattagaaatatgacagtaggaacaaatgagaatatctcttaagcctgaaaattaaaggtatatgaagtttatttgtgtgtgttacctcattgtgtctttattttttgttcctgttgtagatgcaccagcaaggaatactgaagaccgatgatctcataacaaggttctttcgtctgtgtactgaaatgtgtgttgaaatcagttaccgtgctcaggctgagcagcagcacaatcctgctgccaatcccaccatgatccgagccaagtgctatcacaacctggatgcctttgttcgactcattgcactgctcgtgaaacactcaggggaggccaccaacactgtcacaaagattaatctgctgaacaaggtctgaaatcctttcttgccttagtcttggtctacatcagtggggtgttttatttatttatttattattattattttttatattgtttctttgagagagtctcactctgtcacccaggctggagtgcctccgaagtagctgggaatacaggcatgagccacgattcctggagcttttctatttttagtagagtcttaccatgttgcccaagctggtctcaaacttctggcctcgagtgatccacctgccttggcttcccgtagtgctgggattacaggcatgaaccaccttgcctggccacatcagtggtttctttttatttgagatggagtctcgctctgtcgcccagactggagtgcagtggtgcaatctcggcttactgcaaactccgcctcctaggttcacaccgttctcctacctcagcctcgtgagtagctgggactacaggcacttgccaacatgcccggctaatttttcttgtattttttgttttgtttgttttctgttgttttgagacggagtctcactctgtcacccaggctggagtgcagtggcgggatctcagctcctgcaagctccgcctcccagattcacgccattctcctgcctcagcctcccgagtagctgggactacaggcacccgccaccgcgcccggctaattttttatatttttagtagagacagggtttcaccatgttagccaggatggtctcgctctcccaacctcgtgatccgcctgcctcagcctcccaaagtgctgggattataggcgtgagccacagcgcccggccacgtcagtggttcttaaccccattgggtccctcaagtgacccgcctgcctcgacttcccaaagtgctgggattacaggcatgagccaccatgcctggccacataagtggttcttaaccctattgaggccaacccttcccccaaacattttgttaatgtctcttttctgtcctgaaattaaatttgtaaataatatgtaaacatacccgctctgtcttagaatatagtgccttaaccgaaatacaaaaagagatcataatgtatttcagtatgttaatgcttggtagtatgaatttgccccatatacagaatcactgtgagtgggtggctagacgtgcctcctgctgatagattggcaactcaagtacatgagtgatattagtcattggcttgatttacacagtggagttcctggaaatttgaatattaaaacaatgcaaaaatacttgtaaaaatggactgtgattttggatttgggaaattagagatgtgttcttcaagcccctcactgttgggcaagtcaagtggaatgggatctctgcagcctaacagctttcctggcccctgcctactaaatgccaagacaggagtaaatcattcccacatgtcaacttcatgtcagaccagacaaattagattgttatattgtgttaacatggtgaaatgtgaggggccttgctgatttctagagctgaagaagaaccattgggcatttgtggagaatattcaggtgtggtccaaggatgttgaaatgcaaagaaacacacaaaacactgaaggcggagtcagaccaatttatgaccctatcggctgccagcatgtaattttgtattcaaattgtatatatgctttcctttaatgttgggtttaagaatgcaaagtttaaaaagcatgacatcgaagtggtgagtggattatctgaatgatttacaagctctgatttgtgttttatgtaggtccttggtatagtagtgggagttctccttcaggatcatgatgttcgtcagagtgaatttcagcaacttccctaccatcgaatttttatcatgcttctcttggaactcaatgcacctgagcatgtgttggaaaccattaatttccagacacttacagctttctggtgagtattgtgtttgcgattttgtgttaaggtttgctggattaatgtagtaaaattttgggagtagaactcttgagcattttgagcctacattcatgtgctgttcactgtatttaagttggactgtgcttctgactaaggtttttcttctttcagcaatacattccacatcttgaggcctaccaaagctcctggctttgtatatgcctggcttgaactgatttcccatcggatatttattgcaagaatgctggcacatacgccacagcagaaggtgtggctgcagtttatctcctgtagatgaagactataactacctgggcttatttattagcattgcctatagatttctattagtcatttagtagtaattgtacttcttccaaacttagttgggaatgctatttagtgttcactcaagtcaattacttgactgcctctgcctgaaagccattcctcagtgattaggtgttgctgcttcaactcagttgtgggccacctgtgtcagtctctcaagttttttttttattgttttttcctttctttcttttaaaatgttttgcttctttatatacaggaatgatttattttacatatttgtcagttaagggtttttttgggggtaggggtgttgtttttaaagttgaaatccatgtgtgccctcataaatatctgaataaatctctgggtaacagggctctggagcttgttggttttacagactcactttaaatgcggaaggctctcaaactaaggttgaggactactggctatgttattttgaaggattatgatcaagttctatttaagagttcattatctaattggtaatacaacacagttaacatgataagtttttttcctcccatcttggaattaaattggcaaatgagtactgcagaaagtaccattctttggcccctcagatcagaagaaatgtgactgctatgtaatggagtgaacttgacaaagaaggtgaaatagctcttaaatgaagttttgtttggtggagaagggcattctaggaggaaggaacacaacatattaaatgcaattatccaagaattaattgaacataattggtatagttgggggagggtgagcaggctgacattggctgaaaatagagaattcatgtcgtggactgaacaaggttatttgcgaagagttgagctggaagagagaaaggaaatggctgagacttaataaggaattaagaaaacacatttctagttgtcagtttctgcagttgactgttttgtgttctctcagaagtttactcctctccctttttaaattttgctacaggtacacagggaccattatgtcttgaaatctctggagccagtttttttcaaatattatttcccactatctccataataacttggtcctttttaatctttttaatgccagtcttttttcttttcttttctttttttttttttgatggagttttgctcttgttgtccaggctggagtgcagtgccacgacctcggctcactgcaacctctgcctcccaggttgaagcaattctcgtgcctcagcctccagagtagctgggattataggtgcccgccacctcgcctggctaattttttgtattcttagttgagacaggatttcaatatgttggccaggctggtctcgaactcctgacttcaagtgatccactggccttggcctcccagagtgctgggattacaggcgtcagccaccgtgcctggcctttaatgccgatcttttgtaaaagtacttaacattagtattctctacttatattagcatgaagaagataagtcagtgtagctgcttgggcgacttgtagtggctgaaaaacagctgagtataattatgactcatgtacatttctttctttcaggggtggcctatgtatgcacagctactgattgatttattcaaatatttagcgcctttccttagaaatgtggaactcaccaaacctatgcaaatcctctacaaggtaattaacttggatttattataaattaaaataactgagatcttaagaaaatacactttaggaatctgaggccttattttgtttttattaagcctttgaggcatgatatacattcagaaaagtgtaaaaatcaagtgtacttgcataactagcacccaaattgtacagtgtttgtatatgttcaactgtagaagatactacagttttacaaagcgtttgtaccagtttatacttgtaaacagcttggaggagttactggttttcccccatcttcatctgccatacctggtattatctgtttttcattttagccattttggcagttgtactgtgagatctcattgtggatggaattttgtttgttggtgatttatctttttttttttttttttttttttttgagacagagtctcactctgaaacccaggctggagtggagtgcagtggcgcgatctcagcttactgcaacctccacctcccaggttcaagtgattcttgtgcctcagtctccctagtagcagagactacaggcatgtgccaccatgcctggctaattttttgtatttttagtatacatgggggatctcattacattggctacgctcgtctcaaactcctgaccttaagtgatcagtctgcctcagcctcctgaagtgctgagattacaggcgtgagccactgcacccaccctccttgatgacttcttaatgaggttttcatgtgtagatcagccatggatatcacctttttgtgatgctcctcttccagtcttttggctcttgtttgtatttttatttattaaataattctttatatgttttaaatacaagccctttgttgttactatatattcaaacatctcccactctcacagcttgcccttttactcccttaaaggaagggggaggtgtcttttgaggatcagaagctttaaaatttattgtagtcaatattgcagatttttaaacttatattaaaagttgctttttgtgacttgtgtaggaaatctttgcgtgtctcagtgtgctaaggtgttctatttccactgatctgaattgtcagatttatgagcataaagtcgtttaatgttctgaaactattttttatgactgtaggatctgtaatgtcattcctgacattaataatttttgtgttttctctgtcagccttggttagggtttatcaatttattttttctaataactaacttgggccctgattttctcccttttcagtactttaaaaaatttattatatgcttttactctactttctttggttttcattagttctttttttttttagcttctgaagatagacgcttacatcattgtatttttattttttgtccagtctcctcttctagcatattcatttcagcctgtaaactcttgatgcctagtttttcatgatacctaaatggaaatatttgataaatcatctgtgataatgttaattaaagcctaaaactttttaagaaatgttactaaagtatacttcattcttttgaggggggtggggggcttaagttacaataggaaaatgttactccattttccttagtgtggaaatatttttcttgttttttaaaaatagggcactttaagagtgctgctggttcttttgcatgatttcccagagttcctttgtgattaccattatgggttctgtgatgtgatcccacctaattgtatccagttaagaaatttgatcctgagtgcctttccaagaaacatgaggctccccgacccattcactcctaatctaaaggtaaggttccaactagttaaaggaaaacttatgtcttaatatttcagtcctttctctgataagtagactgttcagcactttcctacccaacataacacgcacactattagttaagggtactctttaaaggaaataatgttattaagcctgatagaaggtatgatattgttgctattgctgttgctggtgaatattggttcacagcatttttctagttgctagttttcatattaattttgatattaaatttagctctatttacagaaccacagcttaggtgttggggcagtcatttgctgggtgtgccccacatggcaaagaattgcagaacaaacagacctttgtaatctttttctttttttgaggcagagtcttactctgtgacccaggctggagtgcagtggtgcagtctcggcttactgcagcctccccttcgctggttcaagctattctcccgcctcagcctcccaagtagctgggattacaggcactcgccaccacacctggctaattatgtgtttagtggagatggggtttcgccatgtcagccaggttggttttgagctcctcacctcaagtaatctgcctgcttcggcctcccaaagtgctgggattacaggtgtgagccaccacgccctgccatagtctccatatttcacagttttgtgtctgtgcacttgtgcagttgttccttggtcccttgctattcttggaggattggttctaggacccactgggacaccaaattttaagtatgcttaagtcctgtatgtaaagtggcatataacctttgcatatccccttaaatgacatctgtagtgcttatgatacctaatgtagtgtaatgctattatggaaataactattttaaactatattaataactttttaaaatttgtgttttttattgttgtattattatttatttgtatttatttatttatttttgagacagagtctcactctgtcacccaggctggagtgcagtggcgcaatctcagctcactgcaacttccgcctcctggggtccagtgattctcctgcctcagcctcccaagtagctggtactacaggtgcccgccaccatgcctggctaatttttttttttttgtatttttagtagtgacggggtttcactagttggccaggctggtctcaaactcctgacctcacgatctgcctgccttggcctcccaaaatgctgggattacaggcatgagccactgcacccggcctttattgttgtattattttttattgaccccatcatctacctctaccttcaccccccatattttcgatttgaggttaattagatatggaacctaagggtatggagaacccactgtatttttttgtaagttgttggaataaaggagagagaggaccacttaaaatctcaccaccctgacatggctactatagtttgtttaagagacaggggtctcgttgttttgcccaggctgaagggcagtgactattcacaggtgtgaacatagtgcatttcagcctcaggctcctgtgctcaagccgtcctcctgcctcagcctccagagtagctgtgactagaggtgcacaccactagaagtgcccagctatagtttaaatgtagtctctactctttctgacacatgcatttttttttttttttttttttttgagacggagtttcgttcttgttgcccaggctggagcgcaatggcgcgagctgtggctcactgcaacctctgcctcctgggttcaggcgattctcctgcctcagactcccgagcagctgggattacaggcaccacacccagctaattttatatttttagtagagatggggtttctccatgttggtcagggtggtcttgaactcccaacctcaggtgatccgcctacctcggcctcccaaagtgctgggtttacaggcgtgagccactgcgcccggcttcaattttttttttttttttttttttttttaaggagtaagtgtgatgtctggtcttgctggggcttcttttcaaagactcttggtgagtgaggaatcttattccggattattattttgaaacccaagtccaagaaaaatcagttagttgtgcaaattagacctttgcccaaaaggtatcttgcctctgggaaggaaatacattatagagtgggaaatttttatcattttgaaccaagattctttaaagaaagaaagactgattaataaaatgtggcagctgtgctcttcaaggcatttatagtgtatatagttttagaaaaacagtcccaccacttaagcatagatgtaatttactaataaaaatgattctgcttgtgattcttgcattttatctgtggcaggtggacatgttgagtgaaattaacattgctccccggattctcaccaatttcactggagtaatgccacctcagttcaaaaaggatttggattcctatcttaaaactcgatcaccagtcactttcctgtctgatctgcgcagcaacctacaggttaattggtttggcttaaaactcatctacgtcttccatataaagcactttctatgtatggtcctgtgtgtggtccatttgggagttagtcttttattgtcatttccatcaattgggtgaggttgattaactggatttacgtattttactagttcatttaatcagtgatattttgctacagctttggacaagacagcactagaagagtagaccacagacagtcattagctgttggtactcctaggatttttctgaatacctggatgctgatttacatttctctataggatattttggaaagttatatatttacagtctgtatatgccatgcaactacaactttctctccaaatctttaattggcacagtgcatattttgattttataaactttactttagagctgtgccttgagcttcggcttccttgagggaaatcacatttctcttattgatacaaccacctttggagcatctgtgtgtttgttaaataacctcacaaattcaagcaagtgaatcacaataaatgtttggcctttccatgaaggtgtaagaagggtttagaaatactggtgctagaattggtcctctgcaggagtaagcataaggagttctgttttgctcattttaaggtatccaatgaacctgggaatcgctacaacctccagctcatcaatgcactggtgctctatgtcgggactcaggccattgcgcacatccacaacaagggcagcacaccttcaatgagcaccatcactcactcagcacacatggatatcttccagaatttggctgtggacttggacactgagggtgagtgaagcctgccagttttcagagtagagttctctgtgctttttgctacaatctgatcacaaaaatgtaaaaatgcttcaagccacaataatgaaggaatgttctgtcagtatatttattcacaggtctagctgattattttatctttaattggacattatctgctcagtgcaggaaatacaaaaaagcataaaggaaagaattatccagaatcgtgcagtatcagttttggtgtatgtgactgaagttttttagtgtgaaaataaacttaaagtccctttaaacatagcctcttgttacattgttttgttaggctgccttatataagcatttttattggtgcgtgtttggcaggcatcttgttaaatgttcgtgtataaagattaatgaataggactctcctgttctgcaaaaagctcacagtataactcctgttgcaggttgcagcttttctgcttgagctacatttcatttggtcctctatatttatcttataaaatagagaccccagttaggtgctaactagttgtacagtcctgtccagttttgcatacatatattttagggggacactactctttaactttgctattgattcttgagagatgaattgatgttgcatatatgctgcatgcctatatgtgggatggatttaagacagcttaaattcaagatataacaaaattgaataccatcacgtccaagagctcggcaataaaaggacggcagcctttagagaaacgtgtcactgtgacagactcacaaacacgaataatgtcaagcagaggcaaacaaccaaacccaattaagataatacttattccagtgtagtttagactaatcaaaatgtgggctgggtacccttagggtgtcaagacctttttaggagggctgtgaggtcaaaactttttttttttttttttttttgcgatagagtcttgctctctcacccaggctagaaggcagtggcgcaatatcagctcaccataacttccgcctcaggggttcaagcgattctcctgcctcagcctcccgaggagctgggattacaggcacacgccaccatgcccagctaatttttatgtatttttagtagagatggggtttcaccatgttggccacgctggtcttgaacccctgacctcaagtgatccacttgcctcagcctcccaaagtgctgggattacaggcgtgagccaccgtgcccggcccaaaactgttttcatcataaaacaacatttacatttttgggtctattctgtcatgagtgtacagttgaacttctcagaggttacatgaaatatactgtaacaagttgaacacagaagcagaaatgagaatccagctgtcttttattaagcaagacttagagatctgcaaaatgtagaaagacttagtgatgagtgtcaccagaaaatagttcatgtttcttacattagcacatagtgggtctgtttttaaaaatgaatatttttaaaatctaatttctaatgtggaaaattctgaaataaaacgcacagaaatgagaactctttggggtcccaagaaccactgctttaaaccaaagattaatttgaaagcctctgtcagaaacccaaaccctagccagttagaactgtcttcccatgttggcctttcagactaagtcctaagtcaaggtttcttaatttctaggtcgctatctctttttgaatgcaattgcaaatcagctccggtacccaaatagccacactcactacttcagttgcaccatgctgtacctttttgcagaggccaatacggaagccatccaagaacagatcacaaggtaagcgagcagcttattttttaaatgcttcaaaaggatctcctccctttcatcttttttttttcctctttatgctttcagtgttcagtgaaaatccgtttggttggttttttttttgtttttttgagacggagtgttgctctgtcactcagtctgcagtacagtggcgccatcttggctcactgcaacctccgcctcccaggttcaagcgattctcgtgccttagcctctcaagtagctgggattacaggcgcctgccaccacgcccagctaatttttgtattttagtagagacggggtttcactatgttggccaggctgatcttgaactcctgacctcaagtgatccacccgcctcagcctcccaaagtgctgggattacaggcgtgagccactgcacccggccttcagtgaaaatcttttacatgtccaataatgtgttaaatgtgggatacaattgtgagcaaaatggatggttcctgccctcttaatactcattctgatggacatttatcacaagatagggaattataaatcgcaatcatggcttaaatgaaaagtagtttaccacaaggcacattttgattaaaggtcaggagtttctctgaggtggtggtgataaccagtcctaaatcatgcaggcctatgaagtctatgttaaggaacttggacttttcctcattacctctgggttgaaagcagtagcagtaacaggatcatacttgcattttcctaacaatagttaggaatctgttgccagattgcctagactacatatagcattagagagattgtgatacacacacacacacactttaaaaattgggccagactcttaaaacttgctcatttgcctaattaaatagtcacctatggtgctaaatatggtattcctttgatttgtgtactaaaatttaatatcttattggatgcttagatgatgatgatccatttgtttatataaagctgcagtaagtctccttggacttgtaatctttgttatgcttcatgtacagttggtacgtgaaaggatataaagttaagccaatgcttactggcattcggaaaaattttaccaatttacatgtgaactagcaatgttagcttttttttttttttgagacagtctcgctttgtcgcctcctgagtagctgggattacaggcacctgccaccacgtccggctaattttttgtatttttagtagagacggggtttcaccatcttggccaggctggtcttgaactcccgacctcgtgatccacccgtcttggcctcccagagtgctgggattacaggcgtgagtcactgtgcccagcctgcagtgttagaatacttaattcttattttctgtttcctttttattgagagtgagcttatttatttatttaatttatctgtttatttgagacagggtctcactctgtctcccaggctggagtgcagtggcaccatctcggctcaccacaacctccacctactgggttcaagcgattctcctgcctcagcgtccgactgctgggattacaggcatgtggccaccatgtctgactaatttttatatttgtagcagagatggggtttcaccatgttggccaggctggtctcgaactcctgacctcaggtgatccacctgcctcggcctcccaaagtgctggattacaggcatgagccactgtgcccggcctgggagctcattctggaaattactactttttgtactaactttgtgtgccatgtactctgggctttatgtggcttcctctcccccatcaccccttattctgaacagctgtgaggtagataccattatctgcactttatataaatacttagtcttctacggctaagagcagggttcaaacccaggtattccaacctgtgctatttggagtatattaatccacctgtctttactaaaggtgaaaacttttgcatgtggttcaatagtcagggagaagttagaaaaaaagtaatggaagaataatcatgaatttgtatgcttctatacattaactagctctttctccctttttccagagttctcttggaacggttgattgtaaataggccacatccttggggtcttcttattaccttcattgagctgattaaaaacccagcgtttaagttctggaaccatgaatttgtacactgtgccccagaaatcgaaaagtgagttcaaagtaatttttaattgtctaggaatgagactggagactgaaaaccatctgtctctaggttgggtcagctgaatgagatgcaaggtattgttaggcctactctttaatcagagatttgtaactgtcttcatccttcaggttattccagtcggtcgcacagtgctgcatgggacagaagcaggcccagcaagtaatggaagggacaggtgccagttagacgaaactgcatctctgttgtacgtgtcagtctagaggtctcactgcaccgagttcataaactgactgaagaatcctttcagctcttcctgactttcccagccctttggtttgtgggtatctgccccaactactgttgggatcagcctcctgtcttatgtgggcacgttccaaagtttaaatgcatttttttgactcttggccaaaatttagaagatgctgtgaatatcattttgaacttgtgtaaatacatgaaagagaaaacctttgtctggaacttcttggctttgtgcaagctgtgtccaaggcaagtacataaactggtaccttgtaatgaagaggcagctgatgccatgcacttgtctgagggcatagctccatgtcttctgacattcctggtgtcccaaagaatagcaaaaagccagtttgaatattatgtaacttatttttttaatgtggacaggggaccttgaaaatcactaagttattaaaaatgtggatgtgctagaattggatatgtccaggaacatgggaagggctcactattggaatcccatgagtttccattttgtctctacccaaacgtattccaaagctgactgcatttgtaccatcttatttcttttggggattatacacctcagccgcctgagatgggggtcagctctttatataaagggaaaccagaccaggcctaaagcccaccccctaccctcacccccacaatcctctcctgaaacttaaaaacagtgggaatataggaaagggaaccaaatctcattaattaattgttctcccccattaccccactgaatgaatggccatacaggctaagctgaataatgacaaagttgaaaggaccaatacagccccttttataaggattttgaatgttttgcaaatgtattggtccctgtgttgtattttgtagccttttcctgggcttcagctcccctacttcttgtatgtgtatgcatactgtagctaaccattaaagtcatgacacacacatgagtccactgtgcctttctcagtagcagcagccagtgctggtggtgaggaggaaaagtggacaatccagccctgcagaccttggggccatggggaaccaccaactaacttcttgctgaatgattgatttgattgattgattgataggtcattcctactactaagctggcatgtttaaggaaattgtatttttcttcctatttatttcaacactggacaaatgctggagcaggtttatctggttaagctgagtttaaaatacccagttttaatatccttttcccccaggtattttttttttttttaaagaaaatgagtagatacgtatttaaaaacttaacccacttaaaatttgccttacctttcatgactgtcaagttttatggccagagaggacaaaacagttcaaaattaaataattgaagtcctccttgagtgatgtcttagggtttattccctgagaggtggtttgtgccatctagactgaactttgggtaactatcgagtgccagttacacagcttattaaatccagagtcttttcaataaaggttaagtgacttcctcaaactagacttagatttaaaccaggggtctacctccaaagtctattattaaatgctgaaacacaacaagacttacttattactaccgtatgtccactggctttggttaaaactgagaacaaaacagctgtaacatgctttaagtaacaattagcagtgattcccaagtctgctgttctcaatcctaaaacacatcacccttacctgagttaatcctagcacaccaactttgctacttttcctcttggtgtttagtaagcaaaagaaagatccaaattttcctctttttcaaacatcaatgagtattagcttagaataaagttcttattgctgttccttcagggaacagggaaactgctaacttgtcagttccaacaactgatgtaagatcatcttctgaccatagcgaacctgtaaggcttgctgttccctccagctgagtttcgcatagacttccttattactgagtaaaccttggtcagtttttaagtctgtggcataggtctgcaaagtcagtagaacactgttttgaagcagctgtctccacgatgctttgagcttgggaatatttgtgatcgtcaggctgccctcttcccttttatcatctccccctccatcctggtctttaagctctctgaactcctcagcaggcatgcacagtacctagaagcaaccacagagctctttaattagatgtactgcttttgtacttctgaaatgactcaggagactaaactcatcttagcatttattaaaaatcccacatttcctctctcatcttctagctattttgctttaaatacttagattatcagcattaaatggccattttcagccgtttacctttagtgtggtggtcagctcctcttcagtcagcacctcctccctccctatcacaaaggctccctcttcccctaccatctccagtttgcataggaaatcccagcgctcgtacactaggtgcctttcagcttcagtttttgttcctgtagatgaaacagcaatgtgaaagtctcagtacacccaagggttcatttcttctttagtctgccacccagtctacaaagtcaactgctatttagcaaagctatttaacctgaggcatgggtatagacacaccatcagtgtcaaatattgagttaatgatacactcaccctgtaatgctgcctcacgaactgtcaccatctgaatgtcagctgtgtcatctgtgttgtcaggatatggttcaacaaaaccgtacatatgaatcagttgccagttagccatttgcccataagtgttgaaaatctcatggcctttaggaatgggctgagtggctaccatccgaagacaattctgaggtgaaagggagaagctggggccatgcctttcacgggccagccccatgaagattatttccacttaagaagagccttcagcaggtgtagttcagccatgactgatgctgttaactaccaaagttctacctttagttcctgttagaccctaaactgtgaaacaaaaaagggttgggctaactttaaaaggccagcttcatgtttaactgggtggatttctgcacagtcctcttcagcacttaaaaagttgctagctttaaaaacgaaattttcggccaggcgcagtggctcacacctgtaatcccagcacttagggaggtcaaagtgggcagatcacctgagatcaggagttcaagaccagcctggccaacacggagaaaccccatccctactaaaaaatacaaaaattagccgggcatggtggcaggagcctgtaattccaactactcgggaggctgaggcagggagaattgcttgaacccaggaggcggcagttgcagtgagccgagatcacgccactgcactccagcctgggcgacacagtgagactccgcctcgggggggaaaaaatggaactttcgcagatcaaagtcggaaaggaaaatggaggcaaggattaagaaataaccatacttactaatttctgatcctataaatgtgccatcttttcaggctactttttatatagaatagagctggtataaacacagctttatatcagttctaggatcgtcttagacctttggcctgtgaatgtcctcatccctccaaaacacggagactatcactgttccaggctgctatccacagagccacacacagtctgggctcactgatgtgatcagccagaaaggaatgaaacatggctatgcagaccactcaatgtctagcactaaataaatgatggtagtatagtttatcagaggattaaccacaacttactttgaggactttaaaatgtttcgcattcaaatgattctacagtaatatgcatactaaaaggacatacaggaggagctgatttcacctactcattttgtagcactagtaagagaatggagcctaagacacaatggcttgaatcatgctcaatcagtgcaccaagagaaactccactcaccgcagagtattctagattggcgttgtgattggctaagtggtttagtatgtctgcagcaggcaccatcacgggggagttgggctccttttcatcctcttcttcctccagtggttcctgaaagctgccattgacagaacctggctaaggccctgtcttgggtgagggactgggggtggatttcactgtttttccacttttgtccctctatagagttgtaaagaaaagggttccgtcctcagaggccccacccactgacctataggccatcacaagggccaccagctggtggtagagttctagggagcgaaccctgaggctgaagagatcggggtgggcttccatgaagggcagcacgatggactggtactcgctgcggatgttggccaaatccttctccacggcctcaggtacgcctgtgccctggagcaggcaccggcgctcctcctctggcctgcagggacacccacacccaggttcccttcattccttcacacactttactgggtaggactggtgcaggggcggggaaactgttcttgcagcaggctacggtgcaggcgctccccaacccctcccaaggctctcaccagaacatcgggtgctccaagcggcccagctcgggccagagcgcaaagtagggcctccagcgtgaggccggggcctgcagctcgtggagcagcgccagcagcagtggcacccagcccgactggctctgcagcgcaactcgctctgaggaagacacaggtgtgagcgccccggcgcggcctcgcgggccgggcccgaaccgccccgccccgccccgccccgccccgccccagggccctagcccgccgccgtgcccacctcgctccagcaggccgccgatggagcaggtgtgctgcgacaggagcgcggcccgcggcaccacgaacagcagctctccggcctgcacgctctcccgggccaccatgccgtagccggccaccgtgccctgccggctgaccgccacctgagcaggagggctggtcagggcagcccgcgccccgccgcgggtcctccgcccgccggctcgctcgctcaccttgggactcagctccagccccacccgccggcaccagctcaggaagcaggccacaggatccaggtcgccgccgtccacgggccccgccacctgaga

SEQ ID NO: 736 - DNA, 374 bp, Homo sapiens
tgcagactggccggagttaccgcgggctggaatcgttcctcatgaaaacatcttgagtccaggatctccaattgcactcacgcgctgcgagtgcagaaggagagtcccgtgccgcttggcgcctggttgtgagccaggtacagccctggccttcggtctgtccccgagggctgaggcttcttgcggtctgggtgcaagaacaaaatacggtttctggatcggaagccgagggtctggtggccggccggtggtgagcgacgcaactgggcggcgagcgacctcctgatctcgaccccttgttgccgatggccatggaacccttttactggtggtattcgttcagagcagttttcgtgtgtgtttcagagtggcgt

SEQ ID NO: 737 - DNA, 374 bp, Homo sapiens; identical to SEQ ID NO: 736

SEQ ID NO: 738 - DNA, 552 bp, Homo sapiens
cttgtaccttttatgttgacactgtaagtttgggcactaaaacctaaggacttccatgttgtcattgactctaatctagttagcgttgctactgtatgcttctagctttgattaattcatttaaataaacgtcactgaacttattaaggccttcctagcaaagctctaattattgtaagattccttttgtcggagttgagaggaataaagaagttttgagactcatggtaactttagaagatagtatcatgaaattatttgatttgaatcattgagaaaagccagccagctccttattttaactaccttgggtataggagtatgtgctttgagaatgtatacattaattttttgcacattatcaagaatataaataattccagatgctaaagaaatttggggattatccgttactgcctagtttataggctctgtaaaattgaatagatgtaataagggaattaacaaagactctgacttttaaagtaagagttactatgactttattttaaaagtctgtcttattaatatatctgagatgtgaataaaatc

SEQ ID NO: 739 - DNA, 442 bp, Homo sapiens
tatggtaccccctttttgtagataaaaaattttgaagtttagagaggctaaagttgtgtgtgcaaatgcactccctgccactcagggtagaactactctgcctttatttagtatttagacagaaatgcacttcgatttgctataatcacaagaggttttttgtttgtttgtttgttttaaaaaagaaaaagatctggtccaagatagcagtaactataacgtcatgatgacctctgggtataactcctcagtgtagaccctgatccacaaggctcccctggggtcaggagttcagtgatgcagtgcgctgggctgaaggggcccaaggagggaggaggatgaatttggggccatgtaaggcacaggatcaaagacttgaggtatgatagataaagcaaggatttgaaggtcatctggcagtctgctgctgaaattagaaatg

SEQ ID NO: 740 - DNA, 119 bp, Homo sapiens
gcttgaacctgggaggcggaggttgcagtgagctgagatcacgccactgcactccagcctgggtgatgaagcgagactctgtctccaaaaaaaaaaaaaaaaaaaaaaaaaagtggggg

SEQ ID NO: 741 - DNA, 512 bp, Homo sapiens
taaagatttaatgaaaattggaaatgtattaggctggtgcaaaattaatcggttttagtacaaaagccgtgattacttttgcaccaacctaatacatagtttcaaggtatcttcccacaagtatttattaattataaaggaaaatagagtaactttacatggaagaagtgacagatacagctatttttctgagagatcaaattaaatattaccagtgttcatatacactgaaattctacatcatggttagcatgcaatgagaagaacatagcagcatttttgttatattattgccaaaccattagagtcagagtctaaccattagaaaatctaaaaaaaaaaaaaagaaaaaaaaagaaaaagctaagtgcatactcaaattgtttcccaaacctggaaatattctacaaaaacacttgttccatagttttagaaattatacagaataggaaagtcaaagtaatttcaaagaaaatgagacacatgacaactaaaagcaaacagttttattt

SEQ ID NO: 742 - DNA, 512 bp, Homo sapiens; identical to SEQ ID NO: 741

SEQ ID NO: 743 - DNA, 472 bp, Homo sapiens
acagtgcagtgtaagcttaagaaggtgtggagaggatgggagtcactcactgggcaggaatggcccagctccagcaccttgctatgaccagccagctgctgggaacaggccaggaagagtgtggccttagcgcaaacactggggtggatctcgagatgaaggtgtggccgctggaagctgtcacttcaccactcctcttctgaagagagagctgagccctgcacatgggagcattggtgaaaagggtggtagacgtttatcagtaaccttactggttttgtgctccatcctccatctcccaaagtccccctgaccttgccttcagctccaggaatggccacatgactcagacaaagccaaccagccatcccatttcagtggccagtgatgaatgattcagtgtttacccaaacgcatccaatcagggtgaatctgaggacatttgctggggaggctgggacacagataatct

SEQ ID NO: 744 - DNA, 1525 bp, Homo sapiens
gatgccgcggattagcgggttggctctcagggcggggcgcaggctttctcactgatccgggagcgtgggagcaggggcaacgcggggccatccgggagctgcccgcctgcttcgcagttggctttccgggccctcgagcaacgtctgactttgccctttgtttttaaacaccatgcaggatggtttgtgtacaaacgaagccgtgtcacttctcaagtgtcggtgctcaacgtggcaacgcccctcccgcccccagtacagagatcctgcccatccaccgacaatccccctcctcatcttccttcccccaggtgcgagtgattcaaggaaatccgactggagggaacacacgctgcgatgcaccctctcctcttccattgagccaggggtgaccttgagagactcaggccacctcaccaggctctaccaggaacagcgtctacagctggtagagagcacgggctgcagagaggtaaagatggggttcggaagccaaggctccccttgttgcatgggtgacatcaggcaagctactcaacctctaaccctggcttccccttctgtatactggagacagtatcggccccacaggcacttgtggagcaagtgggtttgagctgagctcctctgaaaatcagaggcacactcagagagtagctcagaaaaccaggatgtgtcagtttcatttgctgggaagcagaagccaagatagaattagaagtgcaatgtctgtgaaggaagaataaagggaaaaggaaacaggagtggggcagggggcagaccaaaaggaagacagacaagtgtgagaaggagccccacagtgcagtgtaagcttaagaaggtgtggagaggatgggagtcactcactgggcaggaatggcccagctccagcaccttgctatgaccagccagctgctgggaacaggccaggaagagtgtggccttagcgcaaacactggggtggatctcgagatgaaggtgtggccgctggaagctgtcacttcaccactcctcttctgaagaaagagctgagccctgcacatgggagcattggtgaaaagggtggtagacgtttatcagtaaccttactggttttgtgctccatcctccatctcccaaagtccccctgaccttgccttcagctccaggaatggccacatgactcagacaaagccaaccagccatcccatttcagtggccagtgatgaatgattcagtgtttacccaaacgcatccaatcagggtgaatctgaggacatttgctggggaggctgggacacagataatctcttttctgacagatggtaacaagaaagtaggtagctgcaggggctgctggcagccatcttgagacatgaaaggtgtccaaattgggatgaattcagcactgaagatggtggtacagagaaacaggagatagggcctttgatcacattgttggatggctggttaagcctctcctgaaatccattctactgctggactttacagttcataaactaataaatcctctttactgtttgaa

SEQ ID NO: 745 - DNA, 119 bp, Homo sapiens
cgcctgtaatcccagctactcaggaggctgaggcagtagaattgcttgaacccaggaggcggaggttgcagtgagctgagatcgtgccactgcattctagcctggcaacagagtgagac

SEQ ID NO: 746 - DNA, 670 bp, Homo sapiens
gatgccgcggattagcgggttggctctcagggcggggcgcaggctttctcactgatccgggagcgtgggagcaggggcaacgcggggccatccgggagctgcccgcctgcttcgcagttggctttccgggccctcgagcaacgtctgactttgccctttgtttttaaacaccatgcaggatggtttgtgtacaaacgaagccgtgtcacttctcaagtgtcggtgctcaacgtggcaacgcccctcccgcccccagtacagagatcctgcccatccaccgacaatccccctcctcatcttccttcccccaggtgcgagtgattcaaggaaatccgactggagggaacacacgctgcgatgcaccctctcctcttccattgagccaggggtgaccttgagagactcaggccacctcaccaggctctaccaggaacagcgtctacagctggtagagagcacgggctgcagagaggtaaagatggggttcggaagccaaggctccccttgttgcatgggtgacatcaggcaagctactcaacctctaaccctggcttccccttctgtatactggagacagtatcggccccacaggcacttgtggagcaagtgggtttgagctgagctcctctgaaaatcagaggcacactcagagagtagctcagaaaaccag

SEQ ID NO: 747 - DNA, 1302 bp, Homo sapiens
caaatatgtatccgttttttaaattttttaacaaaagatgcatataccaaaagcatcactcactactttagtcagattcagagaaccctcttagaccacacttgagttattgtcatggaatagctttttaaaatggctggaaatgaagatagtctcttgaaagaacaccttttcctacctatttcagtattgtagtcaaatcttgaaatacaaattttttttttcaatggcatggtctcggctcactgcaacctccgcctcccggcttcaagtgattctcctgcctcagcctccccagtagctgggatcacgtagcgcccgccagcatgcctggctaagttttgtatttttagtaaagacagggtttcaccatgttggccaggctggtcttgaactgccgaccttgtgatccgcccgcctctgcctcctaaagtgctgggattacaggcatgagcccggccgaaatacaatttaattaaaatacttattttcttattagaaagctgcctctcaatggcacctactgctacatttacatagtaacccaaaattgcagttgcttagcagggagagaatcacagtgctggatattatttatactttttcttccaaaacgatttgaggaagtactgtgctggccattgtttacatcatattaggagatctggatgtcactttcttttcccatatcctcgatttcctcactttttaaaatgtcatgtgtttttgtaagttttcttaaatcctttggaaatgtgatgacggtgaaaaatccctgaaggcttctatacacctgttggcatggaatattttgcaacccgtttcttccctacaaacagaagagacaactaaatacggtttgatctacatctgcaagagcctagccattcagtattaaaaagtgatggccctggttgacggtaccacacctgaagacctatgccctttccttcacactccctacttctgcatttcttccctcctgaacgtctatcaagtggaccatatgaaattgccagtattcaactgttttttatcttaaaaggtgacaattctatatcattcaacctaaattaatgtctcaagaacataacctttgtttctattattgtgaccttacttttaaccatcctagagctctttaacctgttcacactggatttcaaggatcttaagttgttctactacataatcactatcacacttcagaaacattttagtttacattaaatacacttaaccccctcatatttcatctcttcctttctcaaaaatagtaataaataacctcaagccattaaa

SEQ ID NO: 748 - DNA, 241 bp, Homo sapiens
tttgttttgttttttttttcaggagtggggatatgttctaccgtatcgccataccctttttgcaaagtgttagtccagccaccttgagagcaaagtacttggccacaggagttaaattcgtttcttcattgataccaattggcaaatgatatgagacatgaattgtcttttttctttcttttttggggggtggggacggcacgtccgcagaccattttgacaagcaaaaaaaacacttctg

SEQ ID NO: 749 - DNA, 608 bp, Homo sapiens
gtacaccaaatcccacagggtgacagacaaatgagaccccccaaacccaagaggaggaagatctccagataacagagactactccactaatgcgcagtgtttattaaaggaacatgcacagatgtatctgtatataggtattgatatagccacagttatatcaatatttagactatggcagatagctaccaccaccacagggtgctaaaagaaacagtgatacaaaatttttttgatcaggaaggataatgaatgctggaaaagccaatcaaagtctctgtgtgatgagagtgatcaatggtcaagagattactgagaaactctttttctataatactaaattgtgattataagaaatagtccaaatgtttctgaagaattttcaatgttgtatatagaaaatacagaatttcatggtgatatcagaaatgtaaatattgtacagtattgtcatgtacaagcgtacctaatgcacactttatcttttattgtacaaagaaatagtgtacaaaattctttggtttctatggagtacacctaccagagactaccagtgtaaagtgataaataaaaatacaacctaaatgcttttctatgataatgtaaaa

SEQ ID NO: 750 - DNA, 608 bp, Homo sapiens; identical to SEQ ID NO: 749

SEQ ID NO: 751 - DNA, 603 bp, Homo sapiens
gttttataaaaaaaaatcttagatggaatattttactcagccatttctgtagttaacatttgatagccacctgttgaagcagatagcttatactgactgcaccaccgctggtgctcagaattgagggtttttttgcaaatgatatctgacaaggtaaaactttctatttccgtacatggaggcaaaaaccccactttgcaaccattatcagaggtaagattgataataattcatttttttgtagtggcaaatataaatatgaatcatcaaagcaagtttcatatccattcatcagtattacttaacccagaagttaaggtggcttacggaattattagcaatggtaatttttttatcagtattgtgtaacatatcagatttattttatttaaagaattatttataccattaacagattcttatatatattaatgtggcaaaaatgtgcaggttaaatctattaaccaaattatttatattatattaagtaagaaaaaatgtgaaacaaatgtagagagaaaatactacattacaagtatacaaacctaaaactgtgagccattgtaaagtacaaggtaattaataagaaatgtagcacaacat

SEQ ID NO: 752 - DNA, 483 bp, Homo sapiens
gctagattcaaagattttctgattggcaattggttgaaaagttactgactaaagacttaggaatgtctttagagaataaaggggttgtggagaccaaggttttagtgagaatgggataattggtgtggaaaacacaatttggtgtcagaagtgttgtgaatacatagttttccaattgagtttctggatgagattaacatttcaattggtagactgagtatagtacattgtcttccccaatgtgggtgggcctcagccaatcgaccgaagacagaatagaacaaaaaggctgacctcccaggagtaagagggagctcctacagccaaacagcttgagctggaacacttttccagccttgggctcagactgggactgcacatcagtttgcttgcatctccagcttgtcaactgcagatcctgagacttctcagccttcataattgtacgggcaaattccttataataaatcttttatacacaca

SEQ ID NO: 753 - DNA, 412 bp, Homo sapiens
ctaaaaaactaagaggaacaaaaaaagaacattgaacatcaggcaataagggaaaacgatcaccaagagatgagacacaaatgaggcaagctcccaaattggcctgggcctgccagggtacaaagcagaaagggagaaaacaggcagaggctggtggttgccctaagttgaggaaacggagtttctctaagagtctagagagaacaaggcagctagactttgcagggcagatattggaggggagagctgcacagggtgttcccagaccaaactgagggttgggttgctatttcttgtgacccagtaagaacatgtagatgaactggggaggaagagagtttttatttctggaaccagttacaggcagaagccctggaaactataaccagaccaactcaaaattacagttttc

SEQ ID NO: 754 - DNA, 411 bp, Homo sapiens
ttgctcaagacgctggggttagacgtgctccggctacacagcggagtgtcagggggccaagaatatccctctcctttttcttccctcctgctggctttggttgctttcctaaacattgccccggacggcaaagtcggcttcactcttagcccttgttagggaaacgctggatccaagattagctgcgcccttctttgcttcagttgaacaagcaccagagtcgctgatttggcagtgtcggagcgggaggaactggtcttaaaaaggtacctcctgaactcgggaagactgctaaccctccagattattgttttgcatctgtgtgctgttcatgaacatacctcagagctgctcactgcaacttgaaatttcattatatttttaatcacaaagtttgcatcctacccttga

SEQ ID NO: 755 - DNA, 5150 bp, Homo sapiens
ccacaggcattcaccaaggacttcgaggtgagccagctctatgactgcaactggatcgtggtcaactgctccacaccggccaactacttccacgtgctgcgccggcagatcctgctgcccttccgcaagccggtgagtctccgtcccagggcaggggtcacaggcagggggcctggccaggcagggccagctggcagctgggcgtgtatttcccttccagctgattatcttcacacctaaatctctgctgaggcacccagaggccaagtccagctttgaccaaatggtatccggtacgtgcctggcctgggtgtgtggggtagcccacaatggggcggtggcccattgtgtggcttctgcttctggggcttctccaacctcccctctgcctgtggctctgctgacctgcagcagctcctggcatggtcccactagcagtagggttgggaggttggcacaatggctgacctgggccagctcaggtcatgtgggttgcgtccatggtagagtccactggggcccccttagaccctagcagggctggtcgaggcctggcagaggcctgctgagttcgcaagatattgagtatcattcattcatttgtccattttaaaaattcatgagccaaacagacattacaggccctggggtcctggtgtcccctccaggagtctttggccttatttccctgggagtcagatcagataaaacactatagttgcaactgagaggtgactatgtccagggaaggacaggtgtgaggctggtggagcagagctgtcttggaaaatggtcctgggcagtagagggagggctgggaagggcctcagcatggacaggggttggattttctcccatgtgtgtttggatgtcccctctgtgcaggtgggcagctgttagagctctgatgtcgggactggactacctgggctacctgccctgtgctggcttctctcttgagggcctgggatccatttgtcctctctaccccagagtcttcacctgagatgcagggatgtgaggacactacagtagcttcctgagaggttttgcagtgtgcgtgacctggggtcaggatcatgggctcaggaaggaagaatggttggggcttggaggtgaagctcagctgccaggctgaaagaggaggagcatgcagcagcctcctgggacatctgcttagtggtgggggactgcagtgctctgcaggaggtgggcgcagctgggcagaagcaaggttggggcaaaggatgatgccatcatgttgccttctctgtctccttcagggcgcttcttattgtacccccacctccggtcaccttaaacgtgatgcttccagggctcaacccttgggtgtctccacccctctccctatgacagctcagggtgtcatctgccccctgctccatcttttagttcaagaggtgtccactgcagccacaagtccaaacctgcagttagtgtcagtggctaaggagagcctggggatgcaggcctggtcctgagctgccccagcccctctgggtaccaacgcctctgccatgtcctgttggtccctcagggaccagcttccagcgggtgattcctgaagatggggccgcagcacgggcccctgagcaggtgcagcggctcatcttctgcacgggaaaggtgtactatgacctggtgaaggagcggagcagccaggacctggaggagaaagtggccatcacgcgcctggagcaggtgtgcctgaaccccttgtacagtcaagtgatgggcaagctcacgtcgctggccccggctctggccaatgtgccaggcaggccagatgaaggccggtgaggccctgtgcctcctgtccgggggtgctggggacataccgcccctcctctggctatgctcctttgtttctgcctccccagatctctccattccccttcgacctgatcaagcaggaggcagagaagtacccaggtgcggagctggcctggtgtcaggaggagcacaagaacatgggctactatgactacatcagcccacgcttcatgaccatcctgaggcgcgcacggcccatatggtacatggtggggccgctgattgcccctcacctcggccctgaggctctgtcctggctccatctgtcccataggccatgctacccagaactggccctgcccttctctggtgatgagcaatgatggggcatcatcagtactggctttgtgtttgttctgcagccagaactgtattaaggaacctgctacatgtctcaaaactcctgccttagatcttaggccggttatgtagtccttggagccttagtccctgcatctctacaaagggcggtgataagattagatctgatgtatgtattagctctggcacatggtgcgttcccaatactggcatcatgtgttcctgggaagatgggagagggtcctgagaaactccaagaagccaaaagtatgtttgtccccaaagtctttgagttgttgcctcatttgttgtcctcatgggcaagtgcagtgacatggagggacagtttctccccactcttctgtggctaggtgactgagtttgatccgggctttgcagctcattggaagtggtgccagggccaaaaggcagggtctatggcttcgaggtcagcggttctcagatgcgtgccccctgcagtcccggagtgagggcagcggttggggggcggctaggccccgccttccccttagcttgtctctcctcctccaggtatgttggccgggacccagcggctgcaccagccacaggaaacaggaacactcacctggtgtcactgaagaagtttctggatactgccttcaatctccaggcctttgagggcaagacattttagagctgggcaaaacctgtgtaggtctcgctgtgggtttgctggggaccaagggggtgatgaaaaggggaggggcggagctcctgcccaggagaggggctgtggggccccaggataaaacagacacagtgacagggccaagagccagcactgctggccttggtgtcatgccagaatctaccaggactgagggagccagaggagtcctataggcaggctactgtgctggagcatcccccagctgctcccatcttgctggaatttcttgggcggcttctccacctgtatctcaagacagacacccgggggcctgtgtctgtggccgctcccatcccggcagccctggctgctgctcgccccaccctcgcttatctgtagattcaaagcgatgttctcttctgtgctcttagaagtagggagttcagcagtaacagccaggtgaagcgaacctgctgggtgatttgtttgcgctctgttttatggggcattcctgcgagatgtgtcagcttctgtgtgaaatgcagccacagctcatgtgtaccaaagtagaaaaccaaatcacagagaaataaaaacatgcttcagagagatttgctgttttcatttcatgttgtaaaactgggggagggataggcagttgagagaaggtagggaatggggagaaagttaaaaaaatggagagaagaaaatatctgcctccatggatatttttttgagacggagtttggctcttgtcacccaggctggagtggagtggtgcgatcttggctcactgcaacctccgcctcccagattcaagtgattctcttgcctcagcctcctgagtagctgggattacaggcatgcgccactatgcccggctaatttttttgtattattaatagacggggtttcaccatgttggccaggctggtctcaaactcctgacctcaagtgatccgcctgccttggcctcccaaagtgctgggatgacaggtgtgagccactacgccagattttcatttgagcaccaggtagtgtctgttggcttctccactctggccttttgtgggttttgcttccctgtggagatactggagaagctgccacagaggagggatgttttgcttggaacagatcatgtgttcatttatccccttctcagagcacttcctccgtgcgggacactagggcccgggtggaaggcatctgtctgcatgctggcttttcgcatcgggagtccagtggggagacatgtcagctgtttaattcattgagttacgagttatgttggaagtcaatgcagacagctgtgggtgtcagggaaggatccctggaagaggtggtgttcaaaggaagaggaaaagagagatgaacctctctggaacagacagaaatactgaccatagggctggcatgagcaacctaaaagaacgatcagcgtgaggttggacagtggagtgttaagttttatcagcctcaaaaatagcttgttgaaaaattagctgggcatggtgacacgtgcctgtaatcccagctactcaggaggctgaggcaggagaattgcttgaaactgggaggcggaggttgctttgagccaagatcgtgccactgcactccagcctgggtgacagagcaactctgtttcaaaaaaaaaaaaacagagtatgtcttgttgagatatactttgaatcctaccacagggacattcaaagtgacataaagtgaaaagaattgtagcccccatttatagtgtctgtcgtgtcttgggccttctgctggatgttttgcgtgtgtaattaaacgctgtctaatcttcaccatggctttgcatgttgggaatatttccattttatagacgaggaaatcgaggttcatataaagttatttgcccaaggtcacttcctaaggaagtggtggttttggacttcacctctgtcctcaagaccacattgcttcccttggggaaatcagctcttcccataccatgcattcctagccccacagaaatccactagtctgggctttctctgcgattggctgaggcagcaactggtgaggcacctgggctgtgcaggagcccttggggatcagatggtggatgtggcctgcccaaggtgcatacagtcccttccttagtgtgggtacgggaaggctgtagataggccagaggtcatctcctgcaggaagaggtacaatcagccaggcatggtggctcctagctatagtcccagttactcaggagactgatgcaggaggatcacttgagcccaggagtttaagaccagcctgggtaatgtaacaagaccctgtctctttagga

SEQ ID NO: 756 - DNA, 5151 bp, Homo sapiens
ccacaggcattcaccaaggacttcgaggtgagccagctctatgactgcaactggatcgtggtcaactgctccacaccggccaactacttccacgtgctgcgccggcagatcctgctgcccttccgcaagccggtgagtctccgtcccagggcaggggtcacaggcagggggcctggccaggcagggccagctggcagctgggcgtgtatttcccttccagctgattatcttcacacctaaatctctgctgaggcacccagaggccaagtccagctttgaccaaatggtatccggtacgtgcctggcctgggtgtgtggggtagcccacaatggggcggtggcccattgtgtggcttctgcttctggggcttctccaacctcccctctgcctgtggctctgctgacctgcagcagctcctggcatggtcccactagcagtagggttgggaggttggcacaatggctgacctgggccagctcaggtcatgtgggttgcgtccatggtagagtccactggggcccccttagaccctagcagggctggtcgaggcctggcagaggcctgctgagttcgcaagatattgagtatcattcattcatttgtccattttaaaaattcatgagccaaacagacattacaggccctggggtcctggtgtcccctccaggagtctttggccttatttccctgggagtcagatcagataaaacactatagttgcaactgagaggtgactatgtccagggaaggacaggtgtgaggctggtggagcagagctgtcttggaaaatggtcctgggcagtagagggagggctgggaagggcctcagcatggacaggggttggattttctcccatgtgtgtttggatgtcccctctgtgcaggtgggcagctgttagagctctgatgtcgggactggactacctgggctacctgccctgtgctggcttctctcttgagggcctgggatccatttgtcctctctaccccagagtcttcacctgagatgcagggatgtgaggacactacagtagcttcctgagaggttttgcagtgtgcgtgacctggggtcaggatcatgggctcaggaaggaagaatggttggggcttggaggtgaagctcagctgccaggctgaaagaggaggagcatgcagcagcctcctgggacatctgcttagtggtgggggactgcagtgctctgcaggaggtgggcgcagctgggcagaagcaaggttggggcaaaggatgatgccatcatgttgccttctctgtctccttcagggcgcttcttattgtacccccacctccggtcaccttaaacgtgatgcttccagggctcaacccttgggtgtctccacccctctccctatgacagctcagggtgtcatctgccccctgctccatcttttagttcaagaggtgtccactgcagccacaagtccaaacctgcagttagtgtcagtggctaaggagagcctggggatgcaggcctggtcctgagctgccccaacccctctgggtaccaacgcctctgccatgtcctgttggtccctcagggaccagcttccagcgggtgattcctgaagatggggccgcagcacgggcccctgagcaggtgcagcggctcatcttctgcacgggaaaggtgtactatgacctggtgaaggagcggagcagccaggacctggaggagaaagtggccatcacgcgcctggagcaggtgtgcctgaaccccttgtacagtcaagtgatgggcaagctcacgtcgctggccccggctctggccaatgtgccaggcaggccagatgaaggccggtgaggccctgtgcctcctgtccgggggtgctggggacataccgcccctcctctggctatgctcctttgtttctgcctccccagatctctccattccccttcgacctgatcaagcaggaggcagagaagtacccaggtgcggagctggcctggtgtcaggaggagcacaagaacatgggctactatgactacatcagcccacgcttcatgaccatcctgaggcgcgcacggcccatatggtacatggtggggccgctgattgcccctcacctcggccctgaggctctgtcctggctccgtctgtcccataggccatgctacccagaactggccctgcccttctctggtgatgagcaatgatggggcatcatcagtactggctttgtgtttgttctgcagccagaactgtattaaggaacctgctacatgtctcaaaactcctgccttagatcttaggccggttatgtagtccttggagccttagtccctgcatctctacaaagggcggtgataagattagatctgatgtatgtattagctctggcacatggtgcgttcccaatactggcatcatgtgttcctgggaagatgggagagggtcctgagaaactccaagaagccaaaagtatgtttgtccccaaagtctttgagttgttgcctcatttgttgtcctcatgggcaagtgcagtgacatggagggacagtttctccccactcttctgtggctaggtgactgagtttgatccgggctttgcagctcattggaagtggtgccagggccaaaaggcagggtctatggcttcgaggtcagcggttctcagatgcgtgccccctgcagtcccggagtgagggcagcggttggggggcggctaggccccgccttccccttagcttgtctctcctcctccaggtatgttggccgggacccagcggctgcaccagccacaggaaacaggaacactcacctggtgtcactgaagaagtttctggatactgccttcaatctccaggcctttgagggcaagacattttagagctgggcaaaacctgtgtaggtctcgctgtgggtttgctggggaccaagggggtgatgaaaaggggaggggcggagctcctgcccaagagaggggctgtggggccccaggataaaacagacacagtgacagggccaagagccagcactgctggccttggtgtcatgccagaatctaccaggactgagggagccagaggagtcctgtaggcaggctactgtgctggagcatcccccagctgctcccatcttgctggaatttcttgggcggcttctccacctgtatctcaagacagacacccgggggcctgtgtctgtggccgctcccatcccggcagccctggctgctgctcgccccaccctcgcttatctgtagattcaaagcgatgttctcttctgtgctcttagaagtagggagttcagcagtaacagccaggtgaagcgaacctgctgggtgatttgtttgcgctctgttttatggggcattcctgcgagatgtgtcagcttctgtatgaaatgcagccacagctcatgtgtaccaaagtagaaaaccaaatcacagagaaataaaaacatgcttcagagagatttgctgttttcatttcatgttgtaaaactgggggagggataggcagttgagagaaggtagggaatggggagaaagttaaaaaaatggagagaagaaaatatctgcctccatggatatttttttgagacggagtttggctcttgtcacccaggctggagtggagtggtgcgatcttggctcactgcaacctccgcctcccagattcaagtgattctcttgcctcagcctcctgagtagctgggattacaggcatgcgccactatgcccggctaatttttttgtattattaatagacggggtttcaccatgttggccaggctggtctcaaactcctgacctcaagtgatccgcctgccttggcctcccaaagtgctgggatgacaggtgtgagccactgcgccagattttcatttgagcaccaggtagtgtctgttggcttctccactctggccttttgtgggttttgcttccctgtggagatactggagaagctgccacagaggagggatgttttgcttggaacagatcatgtgttcatttatccccttctcagagcacttcctccgtgcgggacactagggcccgggtggaaggcatctgtctgcatgctggcttttcgcatcgggagtccagtggggagacatgtcagctgtttaattcattgagttacgagttatgttggaagtcaatgcagacagctgtgggtgtcagggaaggatccctggaagaggtggtgttcaaaggaagaggaaaagagagatgaacctctctggaacagacagaaatactgaccatagggctggcatgagcaacctaaaagaacgatcagcgtgaggttggacagtggagtgttaagttttatcagcctcaaaaatagcttgttgaaaaattagctgggcatggtgacacgtgcctgtaatcccagctactcaggaggctgaggcaggagaattgcttgaaactgggaggcggaggttgctttgagccaagatcgtgccactgcacctccagcctgggtgacagagcaactctgtttcaaaaaaaaaaaaacagagtatgtcttgttgagatatactttgaatcctaccacagggacattcaaagtgacataaagtgaaaagaattgtagcccccatttatagtgtctgtcgtgtcttgggccttctgctggatgttttgcgtgtgtaattaaacgctgtctaatcttcaccatggctttgcatgttgggaatatttccattttatagacgaggaaatcgaggttcatataaagttatttgcccaaggtcacttcctaaggaagtggtggttttggacttcacctctgtcctcaagaccacattgcttcccttggggaaatcagctcttcccataccatgcattcctagccccacagaaatccactagtctgggctttctctgcgattggctgaggcagcaactggtgaggcacctgggctgtgcaggagcccttggggatcagatggtggatgtggcctgcccaaggtgcatacagtcccttccttagtgtgggtacgggaaggctgtagataggccagaggtcatctcctgcaggaagaggtacaatcagccaggcatggtggctcctagctatagtcccagttactcaggagactgatgcaggaggatcacttgagcccaggagtttaagaccagcctgggtaatgtagcaagaccctgtctctttagga

SEQ ID NO: 757 - DNA, 116 bp, Homo sapiens
caagcctgaaatcccagcactttgggaggccgaggcgggcagatcaccaggtcaggagatcaagaccatcctggctaacacagtgaaaccccgtctctactaaaaatacaaaaaaa

SEQ ID NO: 758 - DNA, 861 bp, Homo sapiens
caagcctgaaatcccagcactttgggaggccgaggcgggcagatcaccaggtcaggagatcaagaccatcctggctaacacagtgaaaccccgtctctactaaaaatacaaaaaaaaattagccgggcatggtggtgggcgcctgtagtcccagctagttgggaggctaaggcaggagaatggcgtgaacccaggaggtggagcttgcagtgagctgagatcacaccactgcactccaccctgggtgatagagcgagacgccatctcaaaaaacacaaccaaaaaaacaactaaccctgggaaataaaacaagctcatggaacaagcagaaggctttaaatgaactgtagtaacttcagagggcaaggagaatattgctgctatgaaataataacagactatttttaaaataattggatgttaagaaaatatgaaattttcccaaaattaaaacctcagtagataggctgaatagcagaacaaacacagctgaaatacaaaataagtttgaagacaaggccaaggaattctccaaagaaagttgaacaaagaacaaatatatatattttaaaattctttaaagaaacatggagaacacaggagtttcacaatgctgatactgcatctaacaggaatcccaggaggagaagacacaggggatctttgtgatggaatgtctgtctcttgactgtatcaatgtcactgtatcctggttgtgattatcctagagtattgtaagatgttattattggagaaaaatgggtaaagattctctgtgatgtagttcttaatgatggcatgcaaatttacagtgatatcagatacaaaagtttaattaaaaaatgagttgtctgctcccta

SEQ ID NO: 759 - DNA, 1022 bp, Homo sapiens
cgtacaccgtgtgcaacagctccctctcggagtacggagtcctgggtgggtccacgctctcctgcaggccaggcaggccccagacacctggggacaagagatgggctgggaagggaccggggccagggcctgggaggggcgagagatgctcagaggcccttaggggatggccctgggggatggtgattgggctgccctcacctaaggccatgtgggaggtgaaatcgtgtcccatctgggccccttggggatcccagttggggggacctccttaccttgaggggttttgtgggtatcagggccccagtgggcgcagacagagagcccaacacagtctgctgtgggttccagctgctgagcagtccagtcttggcccagccctctcacattcctttgagccccatcttgcctcctctgccctgcaccctaggaacactgcactgagatcccttctctgggctctgggcttccctgcctgtgtcccctgtgcatgctctccctcagatgcatcattagctggctcacctcgtcctcactgcctgcccctagaggccaggcagccccccgcccccaggcagatgcctctagggctgtttctgccccttctccttagcagctctgcatgtttttaaggagttcttgacagatggtccctgttgcctccccaggatacctaaataaggttgaacctgaccacacatgatagcagggctgagggtagcatctctgagcatgttgtcagcccccaggatggtacattgtaccctttgaatcccagggaatccctgggttcgtcctggcttgtgagaaggatgggtgggggcatggaggatatactgagaaaggctaaatttgactggagccactgccacttggtgactgcgtgcagcaagctctatcttgtcttctgtttaggctttgagctgggctatgccatggccagccccaatgccctggtcctctgggaggcccagtttggggacttccacaacacggcccagtgcatcatcgaccagttcatc

SEQ ID NO: 760 - DNA, 426 bp, Homo sapiens
cctgcctcagcctcccgagtagcggggattacaggtgcccaccaccacacatggctaatttttgtatttttagtaaagatggggttttgccatgttagccaggctggtcttgaactcctgacctcagatgatccgcctgcctcggcctctcaaagtgctgggattacaggcatgagccatcgcacccagcctatggtacacctttactgaggaaacaattcaggaacatcactcttagtaaggcaattgttgattataagtcaaaaaaacactatcatgtacaaattcaggggattttgtataccttgtttttttggttacaaatatgcaaaattaaagatgtttgctaatacttgtttccaatttttaaacttttcaagtgttgcactgttaataatgttaaaataaaaggcatttgacttagta

SEQ ID NO: 761 - DNA, 6708 bp, Homo sapiens
tttcttttttttttttttttttttttttttgagacggagtctcgctctgttgcccaggctggagtgcagtgacacaatcttggctcactgcaacctccacctcccgggttcaagcgattctcctgcctcagcctcccgagtagctgggactacaggcgcgtgccaccatgcgtggctaatttttgtatttttaatagagacggggtttcaccatgttagccaggatggtctcgatctcttgacctcgtgatccgtccgcctcagcctccctaagtgctgggattacaggcgtgagccaccacgcccagctgcggaagagattttaaagctctccacatatttcagtgtgccacctgtgctaagaactacaactttattattttattttattttacttgtttttgagttggagtctggctctgtcgcccaagctggaatgcagtggtgcaatctcggctcactgcaacctccgcctcctgggttcaagtgattctcttgcctcagtctcccaagtagctggacaggtgtgcgccaccatgcctgactaatttttgtatttttagtagagacggggtttcaccacattggctaggttggtctcaaactcctgacctcaggtgatccgcctgcctcggtctcccaaagtgctggtattacacatgtgaggcattgcgcccggcctgagaactacaactttagacttactgttgtgaaaatctcaaactagcctctattgcaaacatgtgtttgcatcatataggcatgcatagacatgctgacggggtttatgttacagccaaaaagctaatgccaacaccaaccgctggcacttctatatttacttccaggagcccttgcctttaccacccataccccgctacccatgtacctcccactcccccagattgaggagggagctagctaataggcaactgaagcactggattggaactgcaactcaaggttgtgggagcaagagttctgaagtgaagaccttgatcagcacaaacctgatcatgtgaccttgtgaaagttacttcacaattccctgcttcggttactatggttataaaattaaactaatggaatggatctatttgctaaaaatatgagatttaatgagcaaataattttaaagtgctccattaattctgcgattgttaaataacttcactgcataaaattctatagaactctttcaaatatataaaaaaaagcaccccaatgattctttttttttttggaaacagggtctcactctgttgcctaggctggagtacagtgccatgatcacagctcacttcaacctcagcctcccaggtagctgggactgcaggcctgtaccgccattattattattattattattattttgtattttctgcagaaatggggtttggtcatgttacccaggctggtctcaagctcctgggatcaagtgatccgtccgcctttgcctcccaaagtgctgggattacagcggggagccactgcgcccagcccagccagcccgattctgacccagagggtttagaagttgcttagacagatctgctcctgtaagttcacagaactcctctggctactgctgtccctttttttcctgagtcttgtttgctgaaatcttcttgagattctgtgagacaatagcccctatttcttccagtaaattactctttttcttcccctttagacagccagtgctggtttctgttacatgtaaacaaaaaggattttattttttatttttttaggctagtcaagtgaagcagtgggaggcggaggacaaaaagaattttgactaaggcaataaatatattatacaagtgaagtatttcccaaactgtattctgtggaatgctgtgttctcaaatgttaacaagttccatacaagaaccatttatttctaaattctaaagtcacattcatattatgaattatattaaacatatatagttacttttattatacctaataatctgtctttataaaagtgtttacccaaaaatgccagcagattccatgagaaactacctgtactacaatgatcgtcaaactttggtgcatacatgacagaatcaaccggagggcttgttaaaggattgctgagtcaaacccctcgtttcagcaggtttgtggtggggcctgagaatttacatttcttttttttttttttttagacggagtcttgctctgttgcccagactggagtgcagtggtgcgatcttggctcactgcaacctccgcctcccggttcaagcgattcttctgcctcagcctcccgagtagctgggactacaggtgcccgccaccatgctcagctaatttttggatttttagtagagacggggttttaccatattggccaggctggtctcgaactcctgaccttgtgacccacccacctcggcctcccaaattgctgggattacaggcaagagccaccgcgccctgccgagaatttgcatttctaacaagttcccaggtgatgctgacactgctggctcatggaaccactgctgtagtattttccaaattatcctgattctaagaaccacctatgacctgtgctgttttttcagtggttactggctcatgtcacataaattcttttaggattcaaacatgtttgtgatattactcagtatttacatcttgcttttactgcagcatgatagaaaaattaaccacaggtatatcataacaaaaagaccatgagttaccattttcacaaagttcagatatatttaaattagcctatttaatctttttttggttgttgttgagatggagtctcactctgtctctcaggctggagtacagtggcacaatctcagctcactgcaacctctgcctcccaggttcaagtaattctcctgcctcagcctcccgagtagcggggattacaggtgcccaacaccacacatggctaatttttgtatttttagtagagatggggttttgccatgttagccaggctggtcttgaactcctgacctcagatgatccgcctgcctcggcctctcaaagtgctgggattacaggcatgagccatcgcacccagcctatggtacacctttactgaggaaacaattcaggaacatcactcttagtaaggcaattgttgattataagtcaaaaaaacaccatcatgtacaaattcaggggattttgtataccttgtttttttggttacaaatatgcaaaattaaagatgtttgctaatacttgtttccaatttttaaacttttcaagtgttgcactgttaataatgttaaaataaaaggcatttgacttagtatgattgtttcttgaacttcatcttttcaggttattttgttgctggccacttgcaagatttataggcactactgaggcctcagtgctgagattcagcaacattataatcattataattcaaagtttagttttttgttttttgtttttttttttaaagagatggggtcaaaatgctgcccaggcatgtctggaactcctgggctcaagcaatcgtcttgcctcagactgccaagtagctgaactgtaggcacataccacacctggctgtgttcagtttcatgggcaagtcaaactatctagtgttttgtctgtacagacaaggtcaatgcgacttctccaagcttttatcactcaatggtcctacaggcccttgtgagatagatagggtcttagaacaaataactcattacaatcctgggcaaatactctactgaactggtgaactgaaaatgttttgctaatggcccaaatgtcacctcaaatttttttgcctagaggagttacacaactagtttgtataataatttagttatactaggccctcaagtctaatttgaaacaaaatacttggcaaagcaaaatataacctaagaaataattctgattttctgctaataacagacttggtttagtagtcaaaaaacctggacacaagtctcactgccaaggtgctgagtgactgtataaatcacatgatttctaattccagttctctcaatctacaaaattagaacaaggatgactagctcatattaagtatcctctaaaccattttaaaaatgcaaaatgctgttttaactgatggtactttcaattgtatcttttttttttttttttttgagacagagtctcattctgtcacccagactggagtgcagtggcacagtctcggctcactgcaacctacacctcccaggttcaagtggttttcctgcctcagcctcctgagtagctgggactacaggtgcgtgccaccacacctggctaatttttgtatttttaatagagatggggttttactgttgtccaggctggtcttgaactcctgacctcaggtgatccacccaccttggccttccaaagtgctgggattacaggcatgagccaccgcacctggcctaattgtatcttttgaagcaatgactccttcggatctccaggatcctcctgatctttatgcttcagattgggatttatccttcaggaagctttctctgaacacctctaattagacggggaggggtactttgtctgtgtcacacctatccccccaactcgtgttgtttcatagcacttatcacactgtgcattgtctgtgggttcctggatgcagggacgcctctaatccattttagcagtccattggtgtctgtctatctcttccagatagaagaaggcatcaaacacagttcactgatgacaatttattataatctgttagtagcacacagacaaatattagttaaaccagaaccatgtctacacagaagtgggcaatgacatgtgccattctatggcacacggtgtgcacttaatcatcatgttttagcattttgatcttctgcttatggcgctcaatttctttctgcagacgctcaatctccttcttatgatgaacgatttcttcttcatggtgttttttcaaagctgccagttgttctctactctgtgctctacaaggacacggtggctcagggtttaatttcaatccttcaccccaaagagatctcaaagcataacctgtaatgtctaagcaaggaataggagttccaattccatgggagtctagctggtcatcctcttctactcctcaactagtgaaagaataccccatcttaaattgaggtgtagccatcttaagaagaccaaagagcttattgctttcagattcctctttaaaatagaaaactccagagagatgtgacacaagtccctaataccttatgaggggaacaacccagggaacttgactcccctttagggaaaaaaaaaggaacaaaatgaggaagacagacaaaggggtgtagctaaaaggcaaatatccatttcctattccaatctgtctagagctttctttgcctatagaaatgaatggcccactgtaaggccaataaagggtctcttgcatgcgcagtacttggcagttcaatttaggttccaagaagggactggattacaatgttggtttggtcacatttaggcctcagttttccttaactacaaaatgtaggggctcaattagatagtctctaacggctgtaccttggctctctatacggtatggcaggtgtcatggtgataattctcaacagaaggcagaagtgaaaggccaaaggacaagcaaaagcaagattaattcctcactgctctccagagtggacagaagtcagttaaagataactcaaggctggcaaagggaggcccagcccactccatactcctaagcaggagagggaaatctacaggtctaggttgggctgagtagggcaaaagcctttagaagatggtgtccaaccataagtagctcccatgaccagctcccatcatcctcactcttgcggagtcgggggtctagaaacacctgagaagcctgaatgcatgcaggcttgcaaagctaaggcgtgctggcgaggaaggagagcgtagagggggtgacaggtgggtaagggccgagggagtcaggctgggaggcaaacgttgggcggtcggatctagacactgtgcgaagaatctgggggtgtttcgcacgacctgaggagaactccacgcgggagatggtaatgataaaggaggagttgagccgtgggttgttttggagacccgccggtggaaacggtttgggggcctgaaactgttgtgcaggtaactgggagtgccctatacgtggcaacggtcgggacatcaagggttagggtatactggattggggcccgggagttctgttgggggatggggcgcccaaggcaccaggtaggaacgggtggggcgattggcagtttaaggattggaaggccattgggagatccagggctggacttgggacccggtgagcctcaccggaaatatcgttcctcttcagcctgctctctctttccgaaggccccaccggcttcccggatggagcccgcgccccggtcgacattctcggactgcagagagacagggacactggtaaaggtacggaagcaaagatgggatccgcccgcggggctggagcagcggacactgccgcagcgtacctgatccgagccgaagcctcgggcttgcatggtcctcacgccccacacgccaagccacgtccgcgccgccaacgccgtcactgccattgctgctggagctgcacctctggcgtctctgccgcagcaagcagtctctcgttacgcgctaatggcagggacggccaagcac

SEQ ID NO: 762 - DNA, 426 bp, Homo sapiens
cctgcctcagcctcccgagtagcggggattacaggtgcccaccaccacacatggctaatttttgtatttttagtagagatggggttttgccatgttagccaggctggtcttgaactcctgacctcagatgatccgcctgcctcggcctctcaaagtgctgggattacaggcatgagccatcgcacccagcctatggtacacctttactgaggaaacaattcaggaacatcactcttagtaaggcaattgttgattataagtcaaaaaaacactatcatgtacaaattcaggggattttgtataccttgtttttttggttacaaatatgcaaaattaaagatgtttgctaatacttgtttccaatttttaaacttttcaagtgttgcactgttaataatgttaaaataaaaggcatttgacttagta

SEQ ID NO: 763 - DNA, 527 bp, Homo sapiens
cggggttttaccatattggccaggctggtctcgaactcctgaccttgtgacccacccacctcggcctcccaaattgctgggattacaggcaagagccaccgcgccctgccgagaatttgcatttctaacaagttcccaggtgatgctgacactgctggctcatggaaccactgctgtagtattttccaaattatcctgattctaagaaccacctatgacctgtgctgttttttctgtggttactggctcatgtcacataaattcttttaggattcaaacatgtttgtgatattactcagtatttacatcttgcttttactgcagcatgatagaaaaattaaccacaggtatatcataacaaaaagaacatgagttaccattttcacaaagttcagatatatttaaattagcctatttaatctttttttggttgttgttgagatggagtctcactctgtctctcaggctggagtacagtggcacaatctcagctcactgcaacctctgcctcccaggttcaagtaatt

SEQ ID NO: 764 - DNA, 665 bp, Homo sapiens
gagtgcagtggcgcgatcttggctcactgcaacctccacctcccggttcaagcgattcttctgcctcagcctcccgagtagctgggactacaggtgcccgccaccatgctcagctaatttttggatttttagtagagacggggttttaccatattggccaggctggtctcgaactcctgaccttgtgacccacccacctcggcctcccaaattgctgggattacaggcaagagccaccgcgccctgccgagaatttgcatttctaacaagttcccaggtgatgctgacactgctggctcatggaaccactgctgtagtattttccaaattatcctgattctaagaaccacctatgacctgtgctgttttttctgtggttactggctcatgtcacataaattcttttaggattcaaacatgtttgtgatattactcagtatttacatcttgcttttactgcagcatgatagaaaaattaaccacaggtatatcataacaaaaagaacatgagttaccattttcacaaagttcagatatatttaaattagcctatttaatctttttttggttgttgttgagatggagtctcactctgtctctcaggctggagtacagtggcacaatctcagctcactgcaacctctgcctcccaggttcaagtaatt

SEQ ID NO: 765 - DNA, 435 bp, Homo sapiens
attcagaagaacttcaggcatgagttagttgcatataaagtacaatgtgaattcatgaaattgaagttgtgccacaagcatggaagaacccacatgtgtatccctggcctcctgtgctgaggaaaatatggctccttaatttttgctacgacgtttatcctgcagagaggatcaagctgattatgttagagcatttctgggcagagaatttagtgaaagtttgacagcagtggttcaggacatacttacaaatattttgggcagatgactatctgttagcttttacatccccagagccttccttaaattatggtttaagtaatagttcatggtttaattgtgatataatcttagtaggagtaataatatatctgttagggtataatgatgttatggtaatattaagaataaatgttcagaaaccaaccaaataaa

SEQ ID NO: 766 - DNA, 717 bp, Homo sapiens
atgagtcacagtcacaaacatataattacaagccagtgtaagtatatgaaaatagggttttgtgatcttgtcaacaagagaacctgacctatttggggacagtttgagttgagatctgaaagacaagtgggagttaaatagacaaaacctgggggttgtgtgtagaggaaggtattctaggcagaagggaatagaaaggctgtgagaggggaaagtttagtgctttagaaacattaaaaaggccaacatgaccaggatgtacaaagcaaatgcatgtatagagttggagaggtagccagactatgcaggtttttgtgaattataccaatgatgttggtctttatactaagatcaatagaagccgttaaaggggtttgagcagcagaatgatgtggtcagagttttataagatcacactttctgtaatggagaactgacagttggaaggcaaatgtggatatgaggtggaatggacaaatgaagaattaagctcattatgctctttatacctagttatgtgccatgaaacaccacagactcccagctcatctcttatcctcctcattctaattactcttagactccttgtatccttctccacctctcctttactctggcaactcttctacagcatccacagtgtaatttatggcccattattagtaaaatctcctgcgtctgcaacctagtttttaaatgtttctttctccttgctct

SEQ ID NO: 767 - DNA, 717 bp, Homo sapiens; identical to SEQ ID NO: 766

SEQ ID NO: 768 - DNA, 356 bp, Homo sapiens
cctatgacttaaaatacctaacctcctggaaattcagcccagtgggtctcagcctcattttacccagccccccttcaagatgggagttgtgcttgttcaaaggcccctgacatgacgatgctaaaatctccactcagggaggagctatagctcatgaccatctcatgagaccttatactggcagaacggctcagtgcatgtgtgccactgaaactccctcctctacatgtggtgacgcaccctctcccctctccatggcctcagaaaaccctcctgtcactttgcctcagagagacactgctttggagaatactccccatggcctccttacttgagtcaagtagtaaaacctctac

SEQ ID NO: 769 - DNA, 647 bp, Homo sapiens
ttggtctcactgacttcaagaatgaagccgcggaccctcgcggtgagtgttacagttcttaaggtggcgtgtctggagtttgttccttctgatgttcggatatgttcggagtttcttccttctggtgggttcatggtctcgctggctcaggaatgaagctgcagaccttcgcggtgagtgttacagctcataaaagcagcgtggacccaaagagtgagcagtagcaagatttattgcaaagagcaaaagaacaaaacttccacagtgtggaaggggacctgagtgggttgccactgctggctcgggcagcctgcttttattcttttatctggccccacccacatcctgctgattggtagagccaagtggtctgttttgacagggcgctgattggtgcgtttagaatccctgagctagatacaaaggttctccatgtccccatcagattagttagatacagagtatggacacacaggttctccaaggccccaccagagcagctagatacagagtgtccaatgggtgcactcacaaaccctgagctagacacagggtgctgattggtgtgtttacaaaccttgagctagatacagcgtgcccattggtgtatttacaatccctgcgctagacataaatgttctccacgt

SEQ ID NO: 770 - DNA, 356 bp, Homo sapiens; identical to SEQ ID NO: 768

SEQ ID NO: 771 - DNA, 647 bp, Homo sapiens; identical to SEQ ID NO: 769

SEQ ID NO: 772 - DNA, 1379 bp, Homo sapiens
ccgggtcgggcgccgcggggcggaagacgagggcggcgaggtcgggttccgggcgcttggagaagatggtgctgcggcggctgctggccgccctgctgcacagcccgcagctggtggaacgtctgtcagagtcgcggcctatccgacgtgcggcgcagctcacggccttcgcactgctgcaggcccagctgcggggccaggacgcggcccgccgcctgcaggacctcgcggctgggcccgtgggctccctgtgccgccgcgctgagcgatttagagacgccttcacccaggagctacgccgcggcctccgaggccgctcggggccaccaccaggtagccagaggggccctggcgcaaacatttaatcctgggctgtgcggggccgaggccgcttgcttttccttccgggctctacagtggcatcaatgtggaggggtcattccgggcactgcgcgcggcttcgaatcccgactgggattgttggcctgcagacatcccacgcataagagcctaggccagaccgcccgctccgttgaagtcttgtgattggacaagacacagtgtggagacagccctaagcctaacagagatgaaggtaggctgggtccagacacggcacctacggagagccacggaccgaagccagagagcctttcctctgcaagtgggactgaaactcttgacagatgctgctcaatctgactggtatagcaggacagttaattccagggacgatatggatgaaaagacaaccctacagctgccaaattcctttgattaaatgtgtgagctggttgataggcatgagtgtgatacttctcaggcaagatgtgttaagaataccggggactgtaggcctatggtaataataaacacgtattttatgaaatgagtcttctgtgctgggacttgctcattgcactctatgtgttatctcactccttacaacgacattcacatgaggaagcagattactttttggatttttttgtagagatggggtggtctcgaactcttgggcgcaagtgatcctcccgcctcagcctcccaaagtgctgggattataggcaagagccactgcgatggaaacagaggctgctgcttaagttgcccaaagtcttgcagagtgggatgtgagcagaggcatttgactccagggcctaagtccttaacacagctctgcagcatttaccctgatactcaaccccttccttccccaaccccccaccatcaggcattaagactactgcctaggggcagggcctggtggcagttgtgtcttatcccagccactgcagaggcaggaggatcgcatgagcctgagatgagaccagcctgggtagcatagcgagaacctttctcaaaaaaaaaaaaaaaaa

SEQ ID NO: 773 - DNA, 1381 bp, Homo sapiens
ccgggtcgggcgccgcggggcggaagacgagggcggcgaggtcgggttccgggcgcttggagaagatggtgctgcggcggctgctggccgccctgctgcacagcccgcagctggtggaacgtctgtcagagtcgcggcctatccgacgtgcggcgcagctcacggccttcgcactgctgcaggcccagctgcggggccaggacgcggcccgccgcctgcaggacctcgcggctgggcccgtgggctccctgtgccgccgcgctgagcgatttagagacgccttcacccaggagctacgccgcggcctccgaggccgctcggggccaccaccaggtagccagaggggccctggcgcaaacatttaatcctgggctgtgcggggccgaggctgcttgcttttccttccgggctctacagtggcatcaatgtggaggggtcattccgggcactgcgcgcggcttcgaatcccgactgggattgttggcctgcagacatcccacgcataagagcctaggccagaccgcccgctccgttgaagtcttgtgattggacaagacacagtgtggagaaagacccctaagcctaacagagatgaaggtaggctgggtccagacacggcacctacggagagccacggaccgaagccagagagcctttcctctgcaagtgggactgaaactcttgacagatgctgctcaatctgactggtatagcaggacagttaattccagggacgatatggatgaaaagacaaccctacagctgccaaattcctttgattaaatgtgtgagctggttgataggcatgagtgtgatacttctcaggcaagatgtgttaagaataccggggactgtaggcctatggtaataataaacacgtattttatgaaatgagtcttctgtgctgggacttgctcattgcactctatgtgttatctcactccttacaacgacattcacatgaggaagcagattactttttggatttttttgtagagatggggtggtctcgaactcttgggcgcaagtgatcctcccgcctcagcctcccaaagtgctgggattataggcaagagccactgcgatggaaacagaggctgctgcttaagttgcccaaagtcttgcagagtgggatgtgagcagaggcatttgactccagggcctaagtccttaacacagctctgcagcatttaccctgatactcaaccccttccttccccaaccccccaccatcaggcattaagactactgcctaggggcagggcctggtggcagttgtgtcttatcccagccactgcagaggcaggaggatcgcatgagcctgagatgagaccagcctgggtagcatagcgagaacctttctcaaaaaaaaaaaaaaaaa

SEQ ID NO: 774 - DNA, 743 bp, Homo sapiens
caattctccgatctttacatccgaacaccctcaaagtgccgagcttggcgggtccacctccccactccgaagcttccccgagggcggagtgaggactccacttgtgtctcccacgcaccgcgtacagcttccgtaacaccatcctcccagagaaggggcccgaatcgccgaagggcactgcttcgccgatttaaaaaacaaagcaaaaagccccgcatctgcatcaggaaggcgcctctgcctactctgggagagagaagggcacccctcccccttgctacgtagtcgtctgcggaggcacaaccgtggaaacgggagccgccaccaccaccaccgctcaaacctctcggcactggctggggtacagggagcggctgcgagcgaatgggataagcgagcctccagttccccgtcttccagagcaagtggcttcagtgatatccaagcgcccttccagcacccattccctgcctcgccagcaggcaccggggccccacttggcgtttgcggatttcagctgaatgggaggcgacacaatgagacaagagcaaaccgtttctcagcgttcttgcccagggccttcccgtctcgcggcccggcctccctcacccggaagtgctggtcccggtactggctcagctccacgtaggagtcgctgcgcagcgccttcaggaggccacccgacatagtgcagagaagcggaccacaatgcggcgactcccggcacgaggctgcgtccgcga

SEQ ID NO: 775 - DNA, 855 bp, Homo sapiens
aaagagagatcagattgttactgtgtctgtgtagaaagaagtagacataggagactccattttgttctgtactgagaaaaattcttctgccttgagatgctgttaatctgtaaccccacccccaaccccctgctctctgaaacatgtgctgtgtccactcagggttaaatggattaagggcggtgcaagatgtgctttgttaaacagatgcttgaaggcagcatgctcgttaagagtcatcaccactccctaatctcaagtaccgagggacacaaacactgcggaagcccacagggacctctgcctaggaaagccaggtattgtccaaggtttctccccatgtgatagtctgaaatatggcctcgtgggaagggaaagacctgaccgtccctcacagcgtgacacccgtaaagggtctgtgctgagaaggattagtgaaagaagaaggaacgcctctttgccgttgaaacaagaggaaggcatctgtctcctgcccgtccctgggcaatggtgtaaaacccgattgtatgttccatctactgagttaggggaaaaccgccttagggctggaggtgggacatgggggcagcaatactgctctgtaaggcattgagatgtttatgtgtatgcatatctaaagcacagcactcagttctttaccttgtctatgacacagagacctttgttcacgtgtttatctgctgaccttctctccactattatcttatgaccctgacacatccccctctccgagaaacacccaagaatgatgaataaatactaagggaactcagaggccggcgggatcctcgtctgctgaatgccggccccctgggctcccttttttctttctct

SEQ ID NO: 776 - DNA, 855 bp, Homo sapiens
aaagagagatcagattgttactgtgtctgtgtagaaagaagtagacataggagactccattttgttctgtactgagaaaaattcttctgccttgagatgctgttaatctgtaaccccacccccaaccccctgctctctgaaacatgtgctgtgtccactcagggttaaatggattaagggcggtgcaagatgtgctttgttaaacagatgcttgaaggcagcatgctcgttaagagtcatcaccactccctaatctcaagtaccgagggacacaaacactgcggaagcccacagggacctctgcctaggaaagccaggtattgtccaaggtttctccccatgtgatagtctgaaatatggcctcgtgggaagggaaagacctgaccgtccctcacagcgtgacacccgtaaagggtctgtgctgagaaggattagtgaaagaagaaggaacgcctctttgccgttgaaacaagaggaaggcatctgtctcctgcccgtccctgggcaatggtgtaaaacccgattgtatgttccatctactgagttaggggaaaaccgccttagggctggaggtgggacatgggggcagcaatactgctctgtaaggcattgagatgtttatgtgtatgcatatctaaagcacagcacttagttctttaccttgtctatgacacagagacctttgttcacgtgtttatctgctgaccttctctccactattatcttatgaccctgacacatccccctctccgagaaacacccaagaatgatgaataaatactaagggaactcagaggccggcgggatcctcgtctgctgaatgccggccccctgggctcccttttttctttctct

SEQ ID NO: 777 - DNA, 14759 bp, Homo sapiens
agaatataagaaagtatttgctgactgaagccagagaaaaaaatagacctgaatttcttcagggttggcagactgctgttacgaaggtaagtatgtgataacaatgaaacccaggcatgtccaggggatggaattatctaagggtgggtgcctttaagagcatttgaagactagtgacagagataccaaggagagcctggaggctccagggaggcagctgagaatgaacttcagttgactattcatcatcgctgctcagttgcccagtgcttcccgggagcaaatcacttcagtcatttcctccctgaggaagttgctaatgatgtgtttgctcttctggggaaaaaaaaaatcttttttgggtggcacttgcctcttgcatcatggctcttatttccagatgacccatatagacccagagaaatgctgaaatgactatttggatccactgagggggagaaagtgcattgagctacttggcaggcatgtggggaagatagtagcccaagcgcttcagtcccaccactgtctggatgcagcaccatgcttggcccatgacattcaaactgtggggcagagtgcccaggcacagccgctcattcctgtcgtaaataccagtgtcttcattgatggtgggctgtgttgtttccagtgtttttgtgtattggatctcatttgatccttataacctgtgaggtaggcaggtcatttagggataagcatcgtctttattttgtaaatgagaaaactgaagcccaggtgtgattttccccaaaggacatcaaaactattgatacagagtcaggtccttgaacacaggtctgtctggatcattgacaggatgttataggcaggatcttgaaacaaacctttaacccaaacccaaagagacaagatttattagttcacccttgaaccgaaccaaatgctaaattttaaaattaagcttaagttttgtgttttgaataacctagtataccagttcaaaccagaactagtaaatttcctgaatttacccaactaaaaaatctgggtattctaaatttagtcaggatcttctgtattaccgctttgagcagaatacagtaaccagttcttttaaaaacatactgttggccgggcacagtggctcacacctgtaatcccagcactttgggaggcaaaggtgcgtggattgcgtgagtctaggagttcaagaccagcctgggcaacatggtgagacctcatctctacaaataataaaattagccaggcgtagtcccagctacttgggatgctgaggtgggaggattgcttgaactcaggagactgagatcgtgccactgcactccagcctgggcgacagagtgagaccctgtcgcgaaaaacccaaaacaaaaaccatactgtttaccttcacgatttctttcaaagaataggacagggtcgtgtgatgtgagatcagaagtgaagactgctcagcggagttgtcgccatcctagcatccagaggctgggcctttgttctcccaggcacagttccattttgactccactgtcaatgaattgatagcagagctcagtatccaaatgcatgttttaaaacaggtttttacatttgatttcccatttctcatatttaggtaaaacattgtcctataaattggggttgccacctgatagctctttttatgtggccaggtgcctccataaaattagatgcttgagatatcagatataccagctgtcctggagagagaaaagtttcctatcttttgcgcatttttccataaaggagtttttcttatctgaagagaagtaatggatcttgttttaatgactattttgtttttcccttcagtgtattccacaacagaaaaacgacagtgactgtggagtctttgtgctccaggtaaagaaacacttgcttttcggaacttacaatgtgtgaattgagtctgttgggttgagaggggagagatggcagttcctgtatgtgtatatgatgctaggtacgagcaacggagtactttccctcccctttattgctgaggagcagtagtttctgcatgttcagatgttatcattaggaagaaccaccttccagggatcaagagtgaagtgtgggtatcatccatgtctcactggaggttattagtaagccacattggagactgacttgaatttgtccatatcataaccattggcatttgcagaaataaaaaaaaaaaaaaaaacattggcaagcaatctgcaggtctttgacacagtgattagattttaaataaggtccacgttgagaaactgccatcttgtgctgtagatctccttagagatcgaaaagggctatggaaaaaaattcagttatacatatatttatgttggaaattacagaatatgatgcatgaatttagagatttgcaaagatcttggaagaccggttcgtttgtatacctcatgcatgtttggggttttataaacaaattcaagttcccattaagggccatgatgggtctagctgcactccagcaggttgcactttgggaggaattgaggccttttcatcagttgctgcttttcacagtattgggtcaggagggagaggagatcccaagccatgcactagcttggtcagtcacctataatttgggtaaatgcttaaaacagtgtatttttacagtagtttaaacagacatgaaaatgctgccttagatcggggtcccaaacccctgggccacggacagatactgtccacattaggttctcttaggagtgtgaaccctgttgtgaactgcagatgcgagggatctaggttgctcaccccttatgagaatctaactaatgcctgataattcatcctgaaaccaaccccctctcccccaagtctgtggaaaaattgccttacatgtaaccagtccctggtgccaaaaaggttggggtcttctgccttagacactattaggtctgcatttagtaaaacagaatgggctggtccacaactccaagtgccactgaagtgtttctgggaccttttttttgcagtactgcaagtgcctcgccttagagcagcctttccagttttcacaagaagacatgccccgagtgcggaagaggatttacaaggagctatgtgagtgccggctcatggactgaaactcagcagggactctgggaagtctgaccaagttggagcagatggtttgttacttgaatctccaaacacttagttgaatttttacagatatttcagatcagtggtgttgggccactattgttacctcaaatttattttttgcccttattcatttctccagctaccatgtactattgtttaatgttcagtttggtttcatttttaattttatggttctgtgcgtcccccatatttaatatttattattcaaacgcatgcatatagacagagcatgcagtgaagagtattaaaaaaaaaagcttagtagatttggtgcagcttttgaaacttagttagacgtgaactgaatacaggtttcaaatttactcccagaacctaaaaatgcaagatgtttttgatacaacataactctgagaatagtaagtgttccctggggcattaagggtagctgggggtggttttgacaaatccagtcctgttttactttaccagcggcaactttcaccaacttccctctccaagtgagtcttagagagtgcagtccattccttttgaagggtgagatggaagtggtcgtaaactgactggtgtcttctgtttctggaggcacacttgtaagcacagtggctgctttgggaggagtaaggtgtgagaaaaagcaaccttggaggccagtaacaatgacagatttcaatcgtggttttaggaattataatacgtggcatacatctcataaaggcttttgctgggatattgaattccctgaatttttctgttttcgacctgttaaaaaaatcttaacatccatcaaactagtggtcaaacaaatgagaatgcagctgttctcagagtaatttttaagttgtcatttccctgtgttgcctcccaattggaagaagttaaggtttaccaaatgcatttctatttcaagggtatctgaaacgtaaacattcaaaactgaaggctgactgacttgagatgttttgcaggtggctggagagaagagggaaggtaatagagacaacttagtcccatgggagcgcagcaaccgtgtcaggttctttctcctgtcccattagtgacctcagtaacatgcagggtacgtctggcttctgcatggccagtgctgacactagcacagctgttcttctccttctgttgaacctcatcttctgaagaaaggccaagtggcccttgtccatacacttagctgcattaggatgaatatcacgcgtctcacatctttaatccagcctttcgtgacatgttggaaagatacatgtgaaacctacccagttaccctttctgaattgggaggaaaaccaaccaatgtatgtatgagaaactcagaagtctgaatagaaaaacaaagtaaatggcagaagattctcgagtttatgcccgcgtaggtttggagtgttgaaaaagctaaaatgtttagtttcacttggccctgaggtatggttgagaaggctgactgccagcagttgaggattgagtccgaccatgtttacatgcagggttcccaacaccagtggtgacactgggaagcagccccagcactttcctctcctgagtcctccagacccaaaatccttaatgtcaaaccaggtcagtgtttcttactgtgtttcaagtcgttaaaaagactgagagtagaggcactttatgctgctataggtggggttctgtcagcgttaggaaaaaatgacagtttagggtaaggaagatctcataatgagtttttcaaacataattatgcaaacatgagatttttcaaaacatgccagaaatttgcctctgatttttttttttttttgtgggggtgtggtataccaaagtagccagtcactgggctgtcagttcaaaatgtcttgtacttcagagtgaggaagtgtttcagttcctcagtgacagaacctggcatgcagaagagacagaattgttcctgtaagaaaatcaacgccgagagagagctgcccaaatccagtgactcttccacttccagtctcatgcttcatagggcaccttgaggtgtgctgcccagtgtggcttagactaaatgttgagtttgggtttttttttttttttttttttttttttgagtcagagtctcactgtccctcaggctggagtgcaatggcgcaatcttgcctcactgcaacctccacctcccaggttcaagcgattctcctgcctcagcctcccaagtagctgggattacaggtgtgtgccaccacgccccaccgatttttgtacttttagtagagacaggatttcaccatgttggccaggctggtcttgaactcctgacctcaagtgatctgcccgcctgggcctcccaaagtgctgggattacaggcgggagccaccgtgcctggccaatgttaagtattttaaaagtcattttaaaatatttgtcattgatgaaacttggtttcagcacacgtaattgctttccctctcttcttgtgattaggtgtaaacctctatttaactcaagtcctagattagaatgtcctttgtcctgatgtttgcagtaattgcttccttggttaataaagatatttttgaaatatactctggactgttggtgaaagaggcaggcatggctttactggtactagtttggcactgaactgtttgggtgcccatgaggtaggcagaccttatgctttttttttttgagacggagtcttgctctgttgcccaggctggagtgcagtgatgtgatctcggctcactgcaacctctgcctcccaggttcaagtgattctcctgcctcagcttccccaatagctgggactacaggtgtgcgccaccactcccagctaatttttgtatttttagtagagacagggttttgccatgttggtcaggctggtctcggaactcctgacctcaggtgatccacccgcctctgcctcacaaagtgctgggattacaggcatgagctaccgtgcctggcctaaaccttacgcttttgaggttgagtgcaggccttgtgataactaagcgctacttttgacgagccttcaacaagctgcccagtcctctcctcagcagacgcatcaggttgtagttgcatctttacagtggtctttccttttattaaatctatagcagtgaatatagatttgattcaacttttagttacgttctctcaagaatcctaatcaactttcagttagcctcttaagaaagggaaaaaaaggtgctgccagtcatccccaaattatgtttttggctgtgcattctattttctacatagcactgaatctgagtaacagtcatcctggatttatagttggaacagaacagtaacagacctaactgggactcagccagcactagcctcatcttagctgccccttttctctgctttgcagtttactgcttccctgggctagccataacggggttctgggcaggtcagactcttcagcaagacagtgtattaatagtgtgaattagatacactgatgacctgctctgcctagttaagaaactgaattaatcagcagttacaaagcacatactttgttacgtgctaggctttgcctcctggcctctagataattaagacggcccagggaataccagcagagaagtgctaattgtatttgggtgttacaaaagcagacctagacgagctgttcacttaactggtacctgttggtcagaaaaagaatttatttagagattatgatcatgtaaaattacagtactcaacccttctagcaaagtatttttttgaaaaataaactaaatgcctttataaacttgtgttctctcgtcttgagtaacatgtactgtttggcgaggagtaatttttttcttgtgacattccagtcacgacagaggtcatttcagaacagtgagcagtgcaggccctaaccagctcaccctcagagcagcagcaccatcactcgaattttctacaacggaaatgttctatatcttcatcttagcttgactgagaaactgaatgtttaattctcacacttcactaacatgtattaatagtgatgccttcatctgtacgtttgaattttcacttttctccgattaaagtgagaaacaggtcagatgctatccatgagaaataggaaagaatggtgcagtaaagagactcacatttagtgttctctagcccagcaaacataagatgttcttaatccacccacaatttcccttcccttgcaatcatccagagcatgttttttggaaaactaacctattcttccatcagtagaggttgcttggtgcctatttgatcactttcacaagaaaatctgtgcgctctcttcacacgcagcaatagttatttccaactgtcagtcaatcaaaatggacacgcgaattgtccacactattcatagaatccccctggaactcattcatgtgtatccagagtacaggaattccagaacacaaccctctttataggccaggaaacaggcagcaacaacgataagttcatccagctttattgaaacctattacagaagacaatccaaataaaaccactgtctcctgtagaaatctgagttatgttgttttactacaaaagaatataaaacacattaaattacagtgtgaaggaattttaaaaatgaacagtgtatcctcattaaatgtttgcaaagtttcttcctaagcacttacaactagttacagctcttttaaaaattcagatttctacactcagtttaacaggagagacattcacacttagtacttcagccccaactttcacggactattggaaattagaaggtactttgttgctaagtgaaaaaaatgcacattttttcatatcagggaaaattatactggacttaacagttttaaatgagcaataactcagatatattagagagaaatcacctcttgccttacaaataccaaataaattccctagactcccctcccctgtagagaccatcagctcactgtgaaggcttgagcctcagtaggtaaaatttgaggaaaaaaatgagaaatggctaaaagaggcatctgctgcaggaaccttctgtgactgtcaaacattccctcttcaagctcccttttaaaacccagtccattcccaacatcactgaaaatgaaaagaataaacttgctggtcctcatgtcaaggcagtgttttcattgtctcttgatattttatcccatttcctattgacaacatctcccctacccctgaaattatttagaggttccctctatgacaaacccttgcttttttttagctttaggtataacactgacatcttttgaaaaacgtgttagtaaatactcaagttctggcctcatttcctgatgtatgaagcatggaagcagtgctgtcctgtggagattgcttttgcaccaactacacaggaaggtccttgacctctaagcatgcctttagaggttagaattcacagaaaacaaattcaattgtcaaacacctgttcctaattttgtgcaaagcaatacaacatagcacaactccatttgttgtttttcgttttgctttgtagagacggggtcttgctatgttgcccagtctagtctcaaactcctggcctcaagctatccttcctcctcagcctcccaaagtgttgggattacacgtgtgagccaccatgcctggccccacctccatttattaggctatctcatgcaaacttaaaattaaaaaaataatcccaggccccaatgtagatcatgaacctacttaagactcattatggtaaaaacaaattcttacatttttctgtctttctaaaagtgtagtggttatggctaaagactaatcaacattacagatccaatctgttgtcaaagaacacaatttctgacctggtaacaaaattgttctgataatctgacacatggccaagattctcagacaagaattaaaggcattcttttggattctgtcctttaataactttcagaggcttccagctcagtaaagacactgatcaaatcttggtaaaaatgggctcgtgtgcagactttaggtgatgttcttcagcaaattcaacaggccaaaggagtgtttgtcactgacagagctctcaccactcactggttctgtgccagttttccatagcctcctctcccagcatcgtagtcctgccgatactcatcccgaacctttaatggaaagaatccagagttacagtatggaaaagaatggtgtaacaaatatgcctcccacaaacatgttagacaaacagtgaaacctgttcagatgccacaatgtgaacatttcaagcaggacatatgcacttcagctcacttcagtgcgttttgctttcattttagatgttcctgcaggtggaagatacctagccctagcagaagttcaagaatggttgcttgttagaaacgtacagaacataccatttcacggtttaaaaaaaaaattcacccaaaccgttgggtggttttcagatccacttcaagccaaggttatagacacaaagttatttacaaaagagtaaatacaaattgccaaaacacctgtcattgtgactggaatcccaggcaatggctgagcccagagacccttcttgcatacctggcccccagatcgcccacggccgtattgcctgccctccttaaagcctgcgtcccagtctgtgcgaatgattcggtcatccagacgcgtcccatttatgtaccgcatggcgttttccgcatctgcgcgtgagtaatatcttaagtattaaggaacactagcatttttccaaacatttctggaaataggggaacaacatgtaaatgaagctgagttgttaaaaagtacaagagctaatccaaccagatggagttcaaagacagtaattcagcttgcccaggcctgtttgcgattggtttggaagcacatagagtcaaatatgacacgtatccatggctacactgatcatatttcttggacattcctgttgataatttttggtcccatcatctctgtattttggtttgcaagtttagatcactgtacacttcttatccaagaaaccagtgctgtatattcaagttaggttctgtacattccaaggcaccctaatcaagagaaggtcaccgagcacgtggaattgtgctgcacttcactaaaggaaagactcaagctgtcaccaaggtagcagttcccaaacctacttcatcagagacctccctttaattaaaggggaagacatttaatctcagacaaataaaaataagacaacagtgttctgaataaaccatctggagaaactagtatctttgatgttagcaagccaaaataaaatctcttttcattctagcatttgggaaacccgtgtatccccgaggcaagcctgcaatctgggagagaagccctgcctgggtccagtgagtcagcattcttttccttaattatgagcagaaatccagggatcaccagacacttaaggaaaaatttcaaccgaaacaaacataattcagggcacaggaaaaaattcaaaagatacattaaattgggcctgcaaaatttctcagaatattaaattgaatgaccaaaacatacagtaaaaagaacataggataaatccaagaggtccaatacttaaaagagtctgagtaagggaattaaatgatcaaagtaaatagttttggtttgtacctatacagtcaggttatatacatctatataatgaaatactatacagctatttacttaaaagtttttttctttaaagatggggtcttaacccgtcacccccgctggaacacagtcacaactcagtgcagccttgaaatcttgggctcaactgatcctcctgcctcagcttcctgagcagctggcactacaaacaccagccaccatggccagctgtacagctattttaaaaaaagacctacatatgctgaaatggaacaataaaaaataaaaaaatgattttaaaaacagcacatgaaatacactaccgcacacccacagggttacttcttgaaagacgcccaagaaactgctaactgactgcctctggcaaagggcattaggggtttagaacagtacgagatttttgtattttcaccacattctttggaatttttttttttacgtgaagggcaaacatttcttgaaaaactttttgttaaagaaccataaagcatggatttcagaagagaatataaatagtatcagctttacagtataagggcagagacacactgggtggaaagtaggagggagatgaaggaaaacgtagggacgagtgcagggacgcttgtgagctaccactctcagctctaccctggttcagcagctacattagatccatgggaaggatactccacaaaacagaatccacatgctgttttcttcattttatccagacccataatgattttctttatgtcaccacttttgctgaagagttcatagatttgttcttcagttgtgtaaaaagaaagatttccaacatataacgtacagcttttcttcagtaatttttcttgttcttcattgtcaccctagaatttcaaatagagacaaaagttaagcaacttcagagccttgcttaaatagtatttctaagtacggtagagacattcattaattctggtttggaaatcaacttctctcatcccagcctaccagaaatcccttgcccaaaaagggggatgtcgaccttctgtgaagcacttatgcgaagtccagactcttagtagagacagggctcaaaagttataccacatacaacaaagtcacttctacgcccgactgccacgcaagtggcttcccttttccctgcacacaccatatcctcagcagtgcatcctttaaacccaagtgtagactctggaccttgacccaatatatgacaaagggcccttttatccttcgtagtgaaaaataagtgggttttcagagagagagagagttcctctttaataaccccctagagactgttgaaagccacaaccttgatgctttacgtgctcatagatctttctctgagtttaggggaaaatgtagtgatcactaaaaacaaaacagagctcactttcttaatgggcttccaaattgggatgacaggatgaagccagagacttaagcatataactgggcttcatccaacacacctgacagacaaagccctgggtccaaaatggctcatcggggtcaggcgcggtggctcatgcctgtaatcccagcactttgggaggctgaggcgagtggatcgcctgaggtcaagagtttgagaccagcctggctaacatagtgaatgaaaccctgtctctactaaaaatacaaaaattagctgggcatggtagcagcgggcgcctgtaatcccagctactcgggaggctgaagcaggagaatcgcttgaacctgggaggtggaggttgcagggagctgagattgcaccactgcacttgagcctggacaacaagagtgaaactctatctcaaaaaaaaaaaagtccacaggacaatagtcattgtatgttaaaaagaggttttcggaactttggagtgagacattagagaaagtaaattcctttcattttactgctgttactgatttgtgaacatggaaaggaggcatcttctttttctacttttctcacacatgtaagtaagatccaaataaatagcctacagtttaagataactgtggtgtaagtgcttaaagtatattaatatggattccattcacagaatgctagaaattccacatgacagtatggcattagcatctaaaaaaagctacaggtttagactgaggagatgaataatagacaaagtcagaaggttccagttttcatctcacaggatgctttaagttcaaaatggtcaggatgtggaactgtctaaagtagtaactaaaagtggtagaagtgcaaatcatgcctggcacttaggcatcccagcactttgggaagccccaggcaggtggatcgcttgagtcccagagttcgagactggcctgagcaacacagggagaccctgtctctacaaaaaattagctggatgtggtggcgcgagcctgtggtcccagcttctcaggaggctgaggtgggtaggatcacttaggctcaggaggttgaggctgcgtgagccgtgattgcgccactgcacttcagcctaggcaataaagcgagactctgtctcaaaaaataaaatacattaactgaataaattttttttttttgagaaggaatatcgctctgttgcccaggctggagtgcagtggcgcgatctcacagcaacctccacctccccggttcaagcgattctcctgcctcagcctcccgaatagctgggattacaagcgcctgccaccacgcccgcctaatttttgtatttttagtaagacggggtttcaccatcttggccaggctagtcttgaactcctaacctcgtgatccacccgcctcagcctcccaaagtgctgggattacaggcgtgagccaccgttcccagccttgactaaataaatgtaagagcttccctaatttagcgtcaaacaaaatttccctttccctactctagtaacacatttcacacattctccacacttaccttctgctatatgcgccccttcctttcccagtcacaaggggatttttcccttttctgaatcctcactacaggggattatgagctcgcagagcgcagaaactgtcttccctctccctctagggtttagcacaaggatttggcgacagcactcgataaacgtttactaaataattgggttaatgagtcccgccccgccaacccccaaccgtattccatccctacctccgctgatactgaaaagtctactttgaatatctgctgcctcccctttttccacaaaatatactgtgatatagtccggactaaaaatttccctcttctgaaatccagcaattctccgatctttacatccgaacaccctcaaagtgccgagcttggcgggtccacctccccactccgaagcttccccgagggcggagtgaggactccacttgtgtctcccacgcaccgcgtacagcttccgtaacaccatcctcccagagaaggggcccgaatcgccgaagggcactgcttcgccgatttaaaaaacaaagcaaaaagccccgcatctgcatcaggaaggcgcctctgcctactctgggagagagaagggcacccctcccccttgctacgtagtcgtctgcggaggcacaaccgtggaaacgggagccgccaccaccaccaccgctcaaacctctcggcactggctggggtacagggagcggctgcgagcgaatgggataagcgagcctccagttccccgtcttccagagcaagtggcttcagtgatatccaagcgcccttccagcacccattccctgcctcgccagcaggcaccggggccccacttggcgtttgcggatttcagctgaatgggaggcgacacaatgagacaagagcaaaccgtttctcagcgttcttgcccagggccttcccgtctcgcggcccggcctccctcacccggaagtgctggtcccggtactggctcagctccacgtaggagtcgctgcgcagcgccttcaggaggccacccgacatagtgcagagaagcggaccacaatgcggcgactcccggcacgaggctgcgtccgcga

SEQ ID NO: 778 - DNA, 3940 bp, Homo sapiens
cttcacaactgcagcaatcacgaccacacacagtggaacagtatattccaagtgctgatgaaaataatcatcaaaatggaatctaccctgctgaacagtgttcaagagatagtataaaatgaatgctttttaaaattatttatttttagggcggggctgccaagggaggaggaagatggcggcgggggcgaggtgaggtgttggcagtggaaaggggttcgggcttagggggcggggggacgcggagcgatgcccgcgccggcgcaggggcggataaaaagccgtagcgccacgggagtgggcgggagggagagggggtacccgagggccacaagagtatgacggggctgtaagagctggtgtggcgggtgctgcccccctgctctgtctgcaccgcaagctcacctcctggctccgcgttcggttcggcacttggaactggatctggcgactgtgccggcgcgccgcctctgccgcggtcctagcgccgctcggcttcacgctccgcaagtcccaggcgtctgcaggaaccgccatcaccacccgcacccgcgccgggggtcgtgcctgcccgcagcccaccaccaggtgcgctggcgcgcggacggcccttccctggagaagctgcctgtgcacatgggcctggtgatcaccgaggtggagcaggaacccagcttctcggacatcgagagcctcgtggtgtggtgtatggccgtgggcatctcctacattagcgtctacgaccaccaaggtattttcaaaagaaataattccagattgatggatggaattttaaaacaacagcaagaacttctgggcctagattgttcaaaatgctcaccagagtttgcaaatagtaatgacaaagatgatcaagttttaaattgccatttggcagtgaaggtgctattgccggaagatggaaaagcagatattgtgagagccgctcaggacttttgccagtgagtagcccagaagcaaaggagacccacagatgtggatgtagatatgttagtttactcagttcaaatggttgtcctgatcctgatttagtactgaagttcggtcctgtggacagcacacgaggctttcttctctggcacatcagattgactgagattgtctctttgccttcccatgtaaacatcagttatggggactttttctctgcccttcgtcattatgcagcctgtgaacagcgtctgggaaagtggtggtcattggttgcataatttgatctgaggcttatggaggaaaggacccaagtgactctgatgtttagaaagcacctatgaaaccctgtacacacctagttcataatcctcataatttatcaacaaacacaaagaagtgtcttacttgagagtgagtgtgtgcgtgtgtgcgtgcacacatgtgcacgtttgtatgtgtggaaataaacataaatggggacgtgttggagaaggaaatacatagacctacaactttgagcatatagcagtgatgttttaggaactgaaatgtcacacttaataaagtcttcagcccagctacttccctgttttcgtggggagaagggggcctgattagaactgttctggttgtgtttggcgggaggggaataaattttgttcagtccttcttagtgaccaaactttaatttttaggaataacatattgacttactgaactgaagcattctgagttgaaaggagccccagaggaaaggagttctgtgttgctcacatgttaaaagcttgctcaccttcagagcagagggaatacctatcttcagatatccgcccattttcatctcttcattatagtcaaacagtgtgacttgagagtgttgctctggtgtctgtattctggcttatgaagattatttgaaaaagaactcttactacattgaaatgcagacttttaaaaatttaaatattggattaggcagtcaaaaaaccaaacaagcataaaaggtcagtaagttgtaatcttaaaagtaaaggtggaaaactcattataaatggaagaaaagttttgatttccttttttgtttgatgggcagtatgccatattatatccaaagttggtttaaaaaatacttccatcaactatttttatttaaaataaacatttgagggaagttaccaaggcagcttttttcctcaaaagtaacctgttcctctttggaacagcacattttaggggcatggttaatacctgagatttttactcagtaaacctgatggttaccgtgtgtaaaatatctttaagtaggattgaaggcctctgtggggaatataatgttaccaaagcctataaaaataaattttacatgttcttttttatgacagagagcagcactggttctgttattttttaaaatgaataactgatttcttgacaggtgtttagtatttcttccctcactgctgattcttggatagaaaccattctttgtatttgatagactgttttcagaaaactcttatcaacaagtgtacaatagttatctaaaactgtacatttagaatggagcagtttaatactagatctcagaaatttgaaaaatagcaaagaagagtggatttggaaagcatggtctacaattgcttgtcaattctgaagctatgaagaataaatgtttcagctttggattatgaaaccccgtttatgatttttaaaacacacttgaaataaaaatgattgaactaaattttggtccggtgacatcattttgcactgcatagcccattatacattgtaagtctttttgttttaatttattactgagagttttctgtgaagctacagcatatctaatcagagaatttctgatttgtttccttatactgtgattatgttatattaaggcatttgtagtgcagcttaagactgaatttatgctttttgtaaacatgatcggtgtaaatgtcttataaacattctggagtatgtataactttaatgaatgaaatttaatggacctgattaaaataaagggatttaatctttgttaaagtgaagttagtggaataaattacctactggaatatagtccaagtcactaaaggtttaatatttgcatttttgtgcttttattttctccttccattcataattatatacttgaaagtacatctgtagcctatgacttgagtctcttgaacttctaggaagaggcaaactacaaactactaggattctgatttcagatataggcattccagaatcttctctttacgagttcacctgctagtataatctccacaacttgaatggccttggttgttctgtaattgctgccaaaatcatcacaagctgtacgtcatcaaggctccctttgcactcccaagaagaactgttcattttaaacaaaagtgtatgtctttatttgtattggaaaatattgtctttaaattgtttcttgttgacacttcccacaatggaaaaattaccaaattaaacctgttttatggatggcagcttggagcatagcaagaagttggaggatttgaattccattcccagttctcattgcgttttgtttcttaaaactataataattggttactgttataaagtttaaaaggtggttttaatatgaatagcaaattctggtatattgtgactaacgcttaagaatgcctgtctttgagaggaaggtgttataatattaatcaacagtgccaaatacactgtgcatatctacaatttaatctttgaatgtttgttactggattagctccctcctccttctgtgtgatggtaccatgcatagagtcaatcaaatccttgtgatgttttgtatggactttgacaacatgtaactaatgtgtaaagcaagtttttatgattaaggaatcaaatttattgaattttattattgaaagttgaaacttaacatgtataaacaaaaaacaataaaataataaactattttcattgactataaaaa

SEQ ID NO: 779 - DNA, 1900 bp, Homo sapiens
tgggcagtgtgccatattataccaaaagttcttttaaaaaatatttccatcaaccatttttatttaaaataaacatttgagggaagttaccaaggcagcttttttcctcaaaagtaacctgttcctctttggaatagcacattttaggggcatggttaatacctgagatttttactcagtaaatcctgatggttactgtgtgtaaaatatctttaagtaggattgaaggcctctgtgggggaataaaatattaccaaagtctataaaaataaattttacatgttctcttttatgacagagagcagcactggttctgttatttttaaaatgaataattgatttcttgataggtgtttaatatttcttccctcactgctgattcttagatagaaaccattctttatatttgatagactgctttcagaaaacccttatcaacaagtgtacaatacttatctaaaactatacatttagaatggagcagtttaatactagatctcagaagttttgaaaaatagcaaagaagactggatttggaaagcatggtctacaattggttgttaaattctgaagctatgaagaataaatgtttcaactttggattatgaaaccccatttatgattttttaaatacacttgaaataaaaatgattaaactaaattttggtccagtgacattactttgcactgcataatccattatacgttgtacgactttttttttttgttttaatttattactgagagttttgtgtgaagctacagcatatctaaccagagaatttctgattccttatactgtgattatattatattgaggcatttgtagtgcagctgaagactgaatttatgccttttgtaaacatgataggtataaatgtcttataaacattctggagtatgtatagctttaatgaatgaaatttaatggacctgattaaaatgaagggatttaatcgttgttaaagttaagttagtcaaataaattacctactggaatatagcccaagccagtaaaggtttaatatttgcattttcgtgcttttattttctccttccattcataagtatatacttgaaagtacatctgtagcctatgatttgagtctcttgaagttctaggaagaggcaaactacaaactactaggattctgatttcagatgtagtcattccagaaccttctctttatgagttcacctgctagtacaatctccacaacttgaatggcattggttgttctgtaattcctgccaaaagcatcacaagttgtacatcatcaaggctccctttgcactcccaagaagaactggtaattttaaacaaaagtatgtgtctttatttgtattggaaaatactgtctttaaattgtttcttgttgacactccccacaatggaaaaattaccgaattaaacctgttttatggatggcagcttggagcatagcaagaagttggaggatttgaattccattcccagttctcattgtgttttgtttcttaaaactataataatcggttactgttataaagtttaaaaggtggttttaatgtgaatagcaaattctggtatatcgtgactaacgcttaagaatgcctgtctttgagaggaaggtgttataatattaatgaacagtgccaaatacactgtgcatatctgcaatttaatctttgaatgtatgttactggattagctccctcctcctgtgtgatggtaccatgcatagagtcaatcaaatccttgtgatgttttgtatggactttgacaatatgtaaataatgtgtaaagccagtttttatgattaaggaatcaaatttattgaattttattattgaaagttgaaacttaacatgtatgaacaaaaaccaataaaagaatatactcttttcattgactatagta

SEQ ID NO: 780 - DNA, 7123 bp, Homo sapiens
gttcaaatggttgtcctgatcctgatttagtattgaagttcggtcctgtggacagcacattaggctttcttccctggcacatcagattgactgagattgtgtaagtaattaaaagcgtactgactttgtttagattcagcaagtgtttcttgagttcagcactgtactagatctggtggggatttccaaagaattataatactggatcctttacctcagttatttcacagtaccactggtaaaataaagtcatacataaatgagttagacacaagagagtgtatagttgtgcagatgtttggtattgccactgattaccttaggagatcaggagtgagagataactgtaaagggtgtggcttgatccgcagatacataaaatgggtagttttcttatttagagaaaaggcgagaaggggggaaaaagaaaacctggggtgtgttttaaagaaataaggaactagccacaccagagcagacagtgttaggcagtagtatgagatgaaatcaaatagttcagaggtgtcaaggctcagaaatctttaaatgccagcataggaatgtgtgtagtggtaggcaggcaataggaaacgtgttgagcctgtgtattatgtgggaatggtgattttggaagatttgtttagcagcttatgcactagagtggattgaatttgggaagggatgagattaaaaagacaagtgaagaggccataactataatttaagggagaatacattgaagagaatgaaattgcttatttagaacagtttaggcaaactttttttgtaaagggccagatagtaaatattttaggcttttcaggccgtacagtcacttgcaactgctcctctctattgcatctatgcaactctgctgctatagctaaacaaccatggatgatatgtaaacaagcattgtgaccgtgttctgataaaactttgtttacaaaaacaagtatcaggctcctgggctgtatttgctgacccctaatttagaataaaggagagacatagtagccttaaaatatatgtaaatgctgggtcttggagaatactacaaattctctctctcatgacaggtatttaccatgtataattgcaggcatagcactttactaattgcgataaaattagagatgaaatgactcctaagtttttaagcttaagtgactaagtgattatgatattattgagaggaaaccagaaagtgaagggaatattcatttttgaagggaagatgcagatgattttgaggccatagtctatttggatggatacacttagtgtagaacagataaagatgtagaattgatgcttgagtgagaagtcaaggctaaagatacatgtttggggatcatcataacctgggaagtagttgaacctgtgagaatatagagtatctctccaagatgtatgaaggggtcttttaagcttgtgggcaggagggacaaagtatgaaaaagagaagagaacgtgtagcatgttagagttggaaaggactctaaatcatctggtcccaccttctcattttatagataaggaaaatagggaagagagacattgttcaagcttgtcacaaagtgaattagaacccagatctccagactcagagtttctttatggtgggagtatgtttctcttacctggttttctccaagggttttcaagtcatttcaggttgtctccaagtatggcagcagtgatgctgtgtacagttgggagtggtttggagggaagaacagaaggattttggtttgaatcttgactatacagctctataacttgactttggcaagttatttaaactctctatatttgtacaaagggcatgttaatgtggagttgagaatttaaatctgataatggacaagatatgaagcacgtaacaggctcttcctttgacctatgtacatgtctatgatagctatatcacattatactgaggtttgctttgtatttgtgtaccctctacgagactgagcactgtgatggcagggaaaatgttaatcataatacagagaagggaagggtggggttctgacagaacagactgagaaatagcaacagagcttctgaggcattgaggagtagtggcactatattgaagagtcgtaggagatgaggttgattgaaggggtaagatgaggaagacttagggaagttgagagtttgaggacatttgaagcaagctttagcaagaataatgcattaaatttgttctttgagcatattatttcagaggtgtgaataagacttaaggttgatagcagagattattaagagatgatgaggaattagaagtggatgacttattgcagaatttctggcagtctgaggaaggataaagaaaagtatagctaaagacaggcaggagtcctttcaaggtaggtttgttcactctttttttgtggtgcatgtgactgtaggactctgactgtgactcttctattctgaccaggtgtttgaccctgatactatttggaattcccacattataaagctacataaattacagatgtttttcatgttacttatttaaaattaatagttacttctaatacataaaagggaaccctctgattgtgtattcagtctatctttaaagtgcttattttcacactgtaattgcccttgagtaattggaaatggtggaggtaagtgttgatttctaggttgctcacaacatggctacaatatttcatcatgtttggatgctgtgtggctctgcccaacattaagcatggctttcctaaactaagtaatattggctttactctgaccaaggagaaattctttaatggatttaaatgagatcctttatacatagatctctagctttgcattaatctgagcttacgctttaacaagttatgaatctctcattactagttgcttttcttgtggaaaaagaggcatattaattttttagttgatgatgacattgtgtgtccttgtcatctcattgtccacaatgagctgaacaatcttagtagaattgtttggcatattctgcttataatttaccctcagagcagagggaatagctatcttcaatgaacactcgtcaataaacagtgagtgccactacccctcggtgcctcagaggctctctgctatttcccagtcagttctgtcagggccccaccctttcagtctacatattatgattaagacattttccgtgcctgtcatggtgctgtctggtggaggataatttggtgtattctattcttaacttctttttggtccttatcttctggttcccccctacattacagtgtatatctaattgcttttctccccccgtgttttcttttcagctctttgccttcccacctaaacatcagttatgaggactttttctctgcccttcgtcaatatgcagcctgtgaacagcgtctgggaaagtagtggtcattggttgcataatttgatttgaggcttgtggaggaaaggaaccaagtgactctgatgtttacaaagcacctatgaaaccctgtacacacctagttcataatcctcataatttatcaacaaacacaaaaaagtgtcttacttgagagtgagtgtgtgtgtgtgcgtgtgcacgtgcacacatgtgcacgtttgtatgtatggaaataaacttataaatggggacgtattggagaaggaaatacatagacctacaactttgagcaaatagcagtgatgttttaggaactgaaatgtcacacttaaagtcttcagcccagctacttccctatttttgtggggagaagagggcctgattagaactgttctggttgtgtttggcgggaggggaataatttttgttcagtccttcttagtgaccaaactttaatttttaagaataatatattgacttactgaactgaagcattctgagttgaaaggagctccagaggagtggagttctgtgttgctcacatgttaaaatcttgctcaccttcagagcagagggaatacctatcttcagatatccgtccattttcatctcttaattgtagtcaaaagtatgacttgagagtgttgctctggtattctgggttctgaagtctggtattctggtattctgggttcaaaagtatgacttgagagtgttgctctggtattctgagagttgctctgtattctgggttctgaagattatttgaaaaataactcctactacattgaaatgcagacttaaaaatttaaacattggattaggcagtcaaaaaaaccaagcaagcataaaaggtcaataagttgtaatcttgatagtaaaggtggaaaacttattataaatggaaagaaagttttatttccttttttgtttgatgggcagtatgccatattatacccaaagttcttttaaaaaatatttccatcaaccatttttatttaaaataaacatttgagggaagttaccaaggcagcttttttcctcaaaagtaacctgttcctctttggaatagcacattttaggggcatggttaatacctgagatttttactcagtaaatcctgatggttactgtgtgtaaaatatctttaagtaggattgaaggcctctgtgggggaataaaatattaccaaagtctataaaaataaattttacatgttctcttttatgacagagagcagcactggttctgttatttttaaaatgaataattgatttcttgataggtgtttaatatttcttccctcactgctgattcttagatagaaaccattctttatatttgatagactgctttcagaaaacccttatcaacaagtgtacaatacttatctaaaactatacatttagaatggagcagtttaatactagatctcagaagttttgaaaaatagcaaagaagactggatttggaaagcatggtctacaattggttgttaaattctgaagctatgaagaataaatgtttcaactttggattatgaaaccccatttatgattttttaaatacacttgaaataaaaatgattaaactaaattttggtccagtgacattactttgcactgcataatccattatacgttgtacgactttttttttttgttttaatttattactgagagttttgtgtgaagctacagcatatctaaccagagaatttctgattccttatactgtgattatattatattgaggcatttgtagtgcagctgaagactgaatttatgccttttgtaaacatgataggtataaatgtcttataaacattctggagtatgtatagctttaatgaatgaaatttaatggacctgattaaaatgaagggatttaatcgttgttaaagttaagttagtcaaataaattacctactggaatatagcccaagccagtaaaggtttaatatttgcattttcgtgcttttattttctccttccattcataagtatatacttgaaagtacatctgtagcctatgatttgagtctcttgaagttctaggaagaggcaaactacaaactactaggattctgatttcagatgtagtcattccagaaccttctctttatgagttcacctgctagtacaatctccacaacttgaatggcattggttgttctgtaattcctgccaaaagcatcacaagttgtacatcatcaaggctccctttgcactcccaagaagaactggtaattttaaacaaaagtatgtgtctttatttgtattggaaaatactgtctttaaattgtttcttgttgacactccccacaatggaaaaattaccgaattaaacctgttttatggatggcagcttggagcatagcaagaagttggaggatttgaattccattcccagttctcattgtgttttgtttcttaaaactataataatcggttactgttataaagtttaaaaggtggttttaatgtgaatagcaaattctggtatatcgtgactaacgcttaagaatgcctgtctttgagaggaaggtgttataatattaatgaacagtgccaaatacactgtgcatatctgcaatttaatctttgaatgtatgttactggattagctccctcctcctgtgtgatggtaccatgcatagagtcaatcaaatccttgtgatgttttgtatggactttgacaatatgtaaataatgtgtaaagccagtttttatgattaaggaatcaaatttattgaattttattattgaaagttgaaacttaacatgtatgaacaaaaaccaataaaagaatatactcttttcattgactatagtattatgtgaatgctacatttgttctgaacacttaggggctgcaaaaatgtaataagaaatgcatatgactagatagcaatagtgttttttttagatggtatgctcttgattgaaatatattctcacttttaccaggttaaacatttggaatcttataatgttacttgctttttgatagataatagtgaaataaattcagctttgccattgctggagttgtcaaaattccacagtaattaaaatttgaatttttaccgaatatgaaatttccaaattaaaaacgtatatgtgtactcttttaaaaaggaatttgatagttcttgtcaaatgagaaaatttaaaggtaagagttatggtttgtcttatgctgcatagactattcacctcctaacttgaaggtctaatcataagacaattgtttttttgtgcatagttttcatctaaaattaagtttaccaaaggcaaataactgcttactaggaacttcctttagcaaaaattactataaagttcaggacagtttgaaataaaacccaggaaacaagattaatgtgagcagttctccaagatcctaactggtgggacataaactatgatgcaatggataggaaaaggtagtgcaaaaagaatttcttaaggtttaaaaaatacacttttcattataggaaaaagaagattcagagaaacaaaggaatgtaaccttattgattacatttttggtgatcaccgagaattttttgtactatattttaaaaaatgtattctactgtaacaagttaataaagagattttttaaaaaactataaactagaaattgagagtcttgcattctcttttgtatttgattattgtgtctggatataaattacaatagcacatgaaaataaaatgttttaaaaaa

SEQ ID NO: 781 - DNA, 476 bp, Homo sapiens
tcagtgctgctctaaaatcagctccatttttatgtttcattgtgctagagaccctagaagcagattgtgagataaaaagaaatctgttattgggtctaggaaggaaaaaaactaagctattactatgtgcagaacatttttgaagaggaaattaaagataatctagagacagctgttagaattaactagggagttcaatgaattgcaggatataaattcagcataaaaattactagcaaaaattagataagtatataagattccattaacagtgaagaaccccacaaggttcctagagatacatgtaataataatgtgcaagacgtttctaataggaggaaatgggtaaactttgttggaaggcatgaaagaagacctaagtgaatggagaaatatgccatattcatgaatagagagactcgttaatgatggaaactatcattacattgatctaaagataaaatgtatttccaaaa

SEQ ID NO: 782 - DNA, 2787 bp, Homo sapiens
aatatttaaggaaacaataacaattctacgcaaatccttccagacaatagaaaaggaaaaggtctttcctttatttgatgaagatagcattactttcttactaaatcaaacagacatcataagaaacaacaacagagaccaataaccctcatgaacaatgatgaaaatattcttactaaaattttagcaaatctagttcatctatatcatgacaaagtgtactttattgcaggaagataaagttgatttaacattcaaaaatcaataaatgaactttaccatattagtggactaaaaagaaaaatgcatatgatcatcttaatagaaaaagcacttagtaaaacccaacattgagtcatgattaaaagccctcacaaaaccagggataaaatgaagagtcctcataggatgcaggccatctacacaaaaatctatgtcttcctaaaattgagaacaaggtaaagatatctactctcatcacttttattaaacattgtactggaggttctaactcatgaaataaggcaagaaaaagaaataaatcatctagattggaaagagtaacactttccttatcatttgtgtacaccagtccatggaatccatgaaataaaagctattagaactaataagtgagttagcaaggtggcagagttcaagattaatatacacaaatcaagggtatttttatataaaacaatcagaaattgaaattttaaaaatgttatttccaataccattaacaaatataaaattgttagccataaaccaaataaaacatgtggaagacttgtacattgaaaactgcaaaacattgctgagagaaattaaagaagacctaactaaatggaacatgtaccatgttcatggacaggaagacttgaagttgttaagatgtcaattctcccaagttgagttatagatcaattgaatatcaatcaaaattccagaaggcttttaaaagtgaaaatcaataattgaactttaagttttatatggaaaaaatgaaggacctagaatagtgaaaataactttgcaaaagaagaataaagttggaggacttacttatctgatttcaaggctaaatataaagctatattaaaacagtatggtattgccatacatatagacaaatagatcaatgaaacacaatagagattccagaaatagactcacatatatatggccaatagattcttgacaaagtacaaagacaattcaatggagaaagtattgtcttttcaacaaatgatgctgaatccccaaaaaagtgaactttgattcgtacctcacagcatatacaaactttaattcaaaggaattcatagaccttaaactataacatttttagaagaaaatagagcagaaatctttgtgaccttggatacaacataaaaagcataattcataagagaacaaattgataatatgcatttcatcaaaattaaaaacttccactcttcaaaatacactgttaagagaatgaaaagacatagatcaagaggacgtatttttaaatcacgtatctgtaaaggacttctatgcagaacatataaaacccttgaacctcaataataaaatgcaaacatgcaataaaaagaggaacgaaagatttgaacagacacttcaccaacagaaatattgatggcaaacaagatcaggaaaagatgcttaatatcattattcaataaagagatgcaaattgaaactacaagttgataccactacacacctgctagaaggtgtaaaattaaacagactgatataccaagtgatggcaaggatgtagagaaattagaaacctcctacactgctcatgggaaggtaaaaatggcacaaccactttggaaaacagtttggcagtttattaaatagctaaatacacctaccatatgatccagccattccactcctagagagagaaaagcatatgtctatataaaggtttgtatgcaaatgtttataacagctttatttgtaataaccaaaagctggaaccaatccaaatgttcatcaactcctgaatgcattaacaaattgcgtttactgataaaattgaagactcttcagccatagaaagaaatgggttgttgatactgccaaaaacatggatgaatcttaaaataacttcgctgaagcaaagaagccagagctcacaaaagtatgaggacatacactatgcttccaggtatataaaattatagaaaatgcaaactaacctatgataactgaaagtatgtcagtggttgcctggggacaggctgagggtggagaagtggagggaaggattacaaagggcacaaggagagactagggtgatgaatatgtttattatctttttttttttttttccccgagacggagtcttgctctgtcacgtaggctagagtgcagtggcgcaatctcggctcactgcaacctttgcctcccgggttcaagcgattctcctgcctcagcctcccgagtagctgggattacaggcgtgtgccaccacgcctggctaatttttgtatttttagtaaaggcggggtttcaccatgttggccaggctggtctccaactcctgacctcatgatccacccgccttcacctcccaaagtgctgggattacaggcgtgagccactgagcctggccgatctgtttattatcttaactgtagtgatggtttcacaagcataaacacacatcaaattttgcactttcaatatgcgcggtttagtgtatgtcaatcatccctcaataacactgttaaaaaaagaaacattaaaattaaattgtaaattatc

SEQ ID NO: 783 - DNA, 865 bp, Homo sapiens
gggctgcaaaaatgtaataagaaatgcatatgactagatagcaatagtgttttttttagatggtatgctcttgattgaaatatattctcacttttaccaggttaaacatttggaatcttataatgttacttgctttttgatagataatagtgaaataaattcagctttgccattgctggagttgtcaaaattccacagtaattaaaatttgaatttttaccgaatatgaaatttccaaattaaaaacgtatatgtgtactcttttaaaaaggaatttgatagttcttgtcaaatgagaaaatttaaaggtaagagttatggtttgtcttatgctgcatagactattcacctcctaacttgaaggtctaatcataagacaattgttttttgtgcatagttttcatctaaaattaagtttaccaaaggcaaataactgcttactaggaacttcctttagcaaaaattactataaagttcaggacagtttgaaataaaacccaggaaacaagattaatgtgagcagttctccaagatcctaactggtgggacataaactatgatgcaatggataggaaaaggtagtgcaaaaagaatttcttaaggtttaaaaaatacacttttcattataggaaaaagaagattcagagaaacaaaggaatgtaaccttattgattacatttttggtgatcaccgagaattttttgtactatattttaaaaaatgtattctactgtaacaagttaataaagagattttttaaaaaactataaactagaaattgagagtcttgcattctcttttgtatttgattattgtgtctggatataaattacaatagcacatgaaaataaaatgttttaaaaaa

SEQ ID NO: 784 - DNA, 242 bp, Homo sapiens
gaaagatactaaatcagtaaggaaacttgacagacaccaccttaatcaagtgatcaaggttaacattatcagtaataagacatctcaacactatgtaactccctgatatgacgcactgagaaggttataccatcacttctgtggtattcttgccagaaatgcataacttcaatctaatcataactaaaccagggattaactcaaattgagagacattctacaaaacaactgacctgtactca

SEQ ID NO: 785 - DNA, 889 bp, Homo sapiens
ggacggtacaagagagaatgaaaaatgggggcaaaaaaaccagaaaattttctctactatctctgacccataaggaccctcttttccactctgtggaccaaattagaggactcctcttggagtactttctttctgcacccattgtgcggttccagatttcagactgcctttgagtccaggacaggagatactggaggagggataacagaaagcttaccaccagttcggcagtacttcaagttctggtttccttccctagtctgtcatgaccatacactttccagagtccttagataactgctctgtgcattctttccagagtttttagctgcattcagtgggagagagaggatgaagtacacttactttactgtgacactctgtttaatagctaatatctgctttttcttctcttaggcttccttttcctttctattattatttgagttagatttttaatctggcctatcatcaaagcttgtggaaccaaatggaatgattccataatttgttgtgttggtactatgttaacactacactgccatattgctgccaacagtgcttttatttttaattgcattcataagggttatttgacatagttttctctagtgaaacagcaaacaacaatgaaaataagaacttacctcttaatctgcaaaaccaaaccaagtaaaaattctcaaaagattcttggatctgtaaactatcagtgttcctgggtcttatttggaaacataaaataatgagactgcctagattaaaaagaaaattatattggatttttatggtttgaaatttgtgtccccgcccaaatctcatgtcaaattgtcatcctcagtgttggaggagggtcttggtgagaggtgattggatcatggggttggat

SEQ ID NO: 786 - DNA, 889 bp, Homo sapiens
ggacggtacaagagagaatgaaaaatgggggcaaaaaaaccagaaaattttctctactatctctgacccataaggaccctcttttccactctgtggaccaaattagaggactcctcttggagtactttctttctgcacccattgtgcggttccagatttcagactgcctttgagtccaggacaggagatactggaggagggataacagaaagcttgccaccagttcggcagtacttcaagttctggtttccttccctagtctgtcatgaccatacactttccagagtccttagataactgctctgtgcattctttccagagtttttagctgcattcagtgggagagagaggatgaagtacacttactttactgtgacactctgtttaatagctaatatctgctttttcttctcttaggcttccttttcctttctattattatttgagttagatttttaatctggcctatcatcaaagcttgtggaaccaaatggaatgattccataatttgttgtgttggtactatgttaacactacactgccatattgctgccaacagtgcttttatttttaattgcattcataagggttatttgacatagttttctctagtgaaacagcaaacaacaatgaaaataagaacttacctcttaatctgcaaaaccaaaccaagtaaaaattctcaaaagattcttggatctgtaaactatcagtgttcctgggtcttatttggaaacataaaataatgagactgcctagattaaaaagaaaattatattggatttttatggtttgaaatttgtgtccccgcccaaatctcatgtcaaattgtcatcctcagtgttggaggagggtcttggtgagaggtgattggatcatggggttggat

SEQ ID NO: 787 - DNA, 5965 bp, Homo sapiens
gctgctggggcctgcaggtgggatagagcctctgccttcaggaacccacagtctgatggaagagacagagccatgccctcagagagctcccagcctaatgagggagacccggccccacgctggggcaatgacctattttcacagaagcaaatctgagcctctcatctgagaagtctggtgaaatgcgagagacacggtggggaaataggaccttgcggggcccagaggtggggtgggtaagattcagggggatcctgtgggaacaggtgaagcaaggtgtcaggaaggggcagggctcaccccaaggataaaaaatgcctgccccatgcaaggcgaaggggctagcacaaagtcggtgctcagttaatggcaggagggcccttaccccttcccggtagtgcccagcgctttctcctaagctgctgagaagggacaggagcatcagccatgctgtggctggggctgggacagtgtgttgtgctgacaagaacatttgcatccagaaactgcctgggttcgaaccccagctttggcacatcctagccttgtgcacttgagcaggttgcctgagcctcagtttcccccggacagcaatggtttctattgcacaaagctgttgtgaggcttgaaggagctagcgggcccagagggctccacacgggcccagcgcacagtaggtgcttggccagtgttatgctcttcctagtcctgggctgcccagctgcctccttccccagaaatgcattgactggaaccgtaatgtgctgaagcgggagctgggcctggcagagagtgacatcgtggacattccccagctcttcttcctgaaaaacttctacgcggaagccttcttcccagacatggtgagagcccttgtgcagggtcctgctggggggtctgcggggctctgaaaagaagcactccctggcccagggcaggctggtgcagaggctggagggccctgcggacctctccagtgtctgtttttgtgaatatagagaacattcccatcagtggctctcaaccagggcaattttgcccccaggggatttttgttgccgcagtgaggtgcatgcccctggcatctggtgggtaaaagccagggatttcactaaacatcctacagagcataggatgccccgccacaaagcacttttttttttctcacccagatggaaaaagaaagcgtggtttggttccaagtgtttcaggcttctgtctctgggtctcagctgcctgctgtgttccccaccacagcccctcgcttgctgctccccagtgggggtcctgtgtcaggcggggcaggtggggtgggcggtggcctcgctgactctcattaacagggcagctgacaaggagatgagcagatgtgatctcaactgggaagggcctgagcgatgctatcggggtgggcctggcccaagtgcccattaacctcttgggaaaggatgttggggtgttggcagctggcagggatggtcccccgggatggggatagaccctctttcttcagactgcggtctttagcttgaatccctctcttgggacaagccgagggttggaagtgaatgtcggaatcgggatggaatcagggttggaagtgaatgtcggaatcgggatggaatcagggttggaagtgaaagtcggaatcgggatggaatcagggttggaagtgaatgtcagaatcgggatggaatcagggttggaagtgaatgtcggaatcgggatggaatcagggttggaagtgaatgtcggaatcgggatggaatcagggttggaagtgaatgtcggaatcgggatggaatcagggttggaagtgaatgtcggaatcgggatggaatcagggttgcaagtgaatgtcggaatcggcatggaatcagggttggaagtgaatgtcggaatcggcatggaatcagggttggaagtgaatgtcggaatcaggatgcaggttgcaggaggtggggagggtcagtgtgctttcctgactcctcatggggagattccagcctctaggtcctggcagagacccccaagcaggatttctcgactctgtagctctacttctgttttaggctggataagcctttgttgtagatgctgtacagtgcctcgcaggatgcttagcggcctccctggtctctacccactagatgccaatagcactctcccagatgtgacaaccaaaaatgccctagtggacaaaatggaccctgattgagaaccacggcttgaaggcagtgttgtctgttagaacattctgtgctgatgaaaatgttccatatcggtacaatacagtccagtagccactcagctaccacctgaaatgtggctagtgtcaatgaagaacagaaattgtaactttatgtaagtttaattttaatttaaacaactgcatgtggccagtggctactgtggtggacagcaaagctctaagggactgctgagctctggttctggctgaaggtgggggggagggcctaggctggagcgtgtgtgtctgtggtctggcctccatctgccggaagcccctgactgtgggtcatcctgtggggattccctagcttcgttccaggctctgctgaaggatcccagcttgtcttcactggagggtcccatagggaacacccagttaaccccttggtttgtcatatggggaaactgaggcttagaaggagagtgggtcatgtgtctgaggtcacacagtgagcgagtggcggagttgggaccaccccccaatcccatgactcctcctttaagaagaaacagaggcctggctggctctggccctggtcctggtcctggtcctggctcttttctcctctttctgccctttgccccctgcatgccccacccccactcccaccccagcatgttctggcccattagtgggcaaagaagtagttcagggccaaggccaggggactgacctcacgggaccctccagctttatgttggtccctgccatggatgagggtggggcagacttgagggtggggggcaaatcacggagagtttgagggcagagtccaggacaggctcacctcaaactcaagacagcccagagccgccctctagagagaaggtccggagtcccctttgaacaccaagggtcaccccttatgacctcttgccatcaacctgggctgagatttcctctaagaaacccccataccacagcatgggggagaattcccatccccagattagggccccaagccaggtccgcaaccaagggaaggagaggtgcccccagagttaaactcaagtgtccccaaaggctttcagccctttcccccaactcctcagtcccacaggtggccagataaaaagcatggattttggcaccagccagatccaagtccaaatgtcagtctcatcattctctggctgtatgattatgtgacttaacccgtctgagccacagcttcagagggaggctgtggcatttagtgatgatatatctggcacataaaagatgctcaataaatgctaacaatgatcagggctgccaaagacagttaagcaagctgtgcacagcaaaagcacaccacactttggaagacatccacaccacagaccttgtaggtgtgtatatttgttgtacaagtttctggcagatgacacgaaaatctcttgttctaacaaagttgctataatatgacaattttctcatagatgaaagaaagagtgggagaagtttttttttgttttttgtttttgttttttaatgtacaaaattcctggtagccctggctgttattcaacctcatttccaaccctgaatctttttctcctctgctttcataggccctaactcttgagcaaactccagtcctagagccctttctaggctgtggctatggccaacccattccccagggcctgtctcattctggcaaggaaggggtgccaaaagcacagcacttacagccagacagcctccctcttgccttttctcttttgcaggttaacatggtggtcttaggcaagtacctgggcatccccaagccctacgggcccatcatcaatggccgctgctgcctggaggagaaagtgcagtccctgctggagcctctgggcctgcactgcatcttcattgatgactacttgtcctaccacgagctgcagggggagatccactgtgggcaccaacgtgcgcaggaagccctttcccttcaaatggtggaacatggtgccctgagcctgcccccacccgccatcctctctgccctcttgctagggaaccctgccagggtgaaagcaaagaacaaccacctggcctccattctcttgggggagtcctggcactttgcaaacatcctggccaccatgggcaccaggacacagggatggataccacctaccctcgcctctggaatggcctacccaacccgagaagaatgcacctcattcttccctggcctctttcccacccacagcccccagaggctctagatcaacaatgttagcatgttccagaatggctgtgggaggcctaaggagatgggccccacttagaattgctcccccttcattctgatgcctccctggggaacaaggataatgactttgcatctgcacctggaacggggcctgggggacctggggtctggtgtgccaggcaccaggctgcctctgctcttggaaaactaggaaaggggatcagaaacatcctctccccgctctaggtttcttctcccaaaggggacccaaggctgtgacacttacctccacccccatccagcacccttcagctgtgtgtggacaaacaaggacagaaaaacccggtgtccaagggccaatttaaatagaaaaaaagacaacaaaattttaatagctgactccgacctcagaagagtgattgctacctttctggaaagactttaattaccagagctggcttctcccagctcagaaatgctgagaagccaacgtgaggcctgaggacacacaaaggatgacggggcaggaggggatgaggtcagggtagcaaagtgtgtgacgacggatttgggggcctagaggtgtccgtggttcctgggctgggattttggactctggatttgaagggagctggagcttccagatgtagcaggggtagggggccaaatgttagaagagggtgtgtgtgttgggaggaaattaggttatctctgaaggtggagtttaatttcctttaatagtctttaattattccccttcattctgcaggcagtgggaggggaaggcttgcccggtctctctcagcaacccagggaccctgcacatagcttaggtttcatccctgaataaaccgctgtgcaggcccatgtcccctcccacagtagggaagacagctgccacgggaggttaatagcccggagtgaggtcactgaaacatgcacaggcaggctggttcagctgggctgcagggcacgggcaggaagaaaccagcctaccctcttcccccactgccagtgaggccattgtagggcagttggccctagggcttcggtccatctaggttttcagtggcccctgctgagacctcacactgagccaactactgtcactgttttaaccaacaaaagctagcctggaactgctatggttaaagtgggtgagcgggaacctgaaaatccccttctggaaggttctacagaactctatttgcaagctcctgctttaacctgagcgtcctctgctcaggatcataccccagcctgcactgagtcaagaaggaaaaggaggctctgaaggggccgggggtgtgagctggggttgggactcccctgagaaagagctgtgggtaggaagggagtgagcattgcaaagatagggctgggggtcggggccacactgattgtgggaagctctggagttgctgctgggccatcgaggggccctggtgttggctctgagaatgttctgggtgaccagtcacctactttctgatcaataaaaatgtcgacatgcatttcttaca

SEQ ID NO: 788 - DNA, 481 bp, Homo sapiens
ggctatgcagccagggagcagcagggctggggccttgagagaggaaggaggagaagccaggcttggtcagggcccctctgcagagcttcctgcaggagctaacagaccctccaagggcttggttggcccatctcccctccttatcacagcctcagtgttctcatctggggaatacctggggaatagagcattggaatggatgtggtgcagacatccacaaggatagccctgagttcaaatcctgatcttggcatttgctggctgtggtatcaagggtgtgttctgaacctctcagtgcctcagtttcctcttctctgagttgtagatgataattaatccctcctatagttgctttaaatattaataatacattaagtaggatgcccagagcatggcagacattcaataatggtagctgtgccataattattaggctccaagtccagagtcacttcctgaggggttccttatccatcaccag

SEQ ID NO: 789 - DNA, 292 bp, Homo sapiens
ggtggctcacgcctgtaatcccagtactttgggaggccaagtcgggtggatcaagaggtcaggagatcgagaccatcctgactaacacggtgaaaccccgcctctattaaaaatacaaaaaattagccgggagccgtggcaggcgcctgtagtcccagctactcgggaggctgaggcaggagaatggcgtgaacccgggaagtggagcttgcagtgagccgagatcacgccactgcactctagcctgggtgacagagcgaaactctgtctcaaaaaaaaaaaaaaaaagaaa

SEQ ID NO: 790 - DNA, 647 bp, Homo sapiens
ggaaagagcaggccccataaaaaaaacaggttctttttttatggggagcgtctaaggtgagattcataaggtccttctctaaggttaaatctttttccatggtggccggaacttggtgtcttgtagcctggttacgaagtggcacgttgagcttctattgacgatgccctgcatggaccagctgggatctggctggggctgccctgtgtccctaacgaccataggcaatccatcttcttgtgtcagcaatttctggacacccactgttttccaccaagagctgaggtggcaacaactcagtgagcaataaacaaaatgacacagaaatgcacagtgttgttatgaaggagcctgtttacctgtgttcaaaatctggcaccattcccttgagcagggcccgctcaggagggaccaggtctgccagtttctgtgcctgcagagagacgaagccccacgagccacaccctactctacaagaggaaagggggttggatgggaagaatctattttgctgttttggaaagcacacagccgacctacaaacctcctgtgatggtgtttcttcgcgatgtgtaaaataaggctttatttgtcaattccgctgtaaaataagcattgtccgagtaaaaacagcagcaacaacaaaa

SEQ ID NO: 791 - DNA, 643 bp, Homo sapiens
ggaaagagcatgaccgataaagaaaacagttcctttctgatggggagcgtctgagtgcagatcatgaggctctttctctaggtttaattcttttccatggtgaccggacttggtgtcttgtagcctggttacgaagtgggacgttgagcttctactgacgatgccctgcatggaccagctgggatctggctggggctgccctgtgtccctaacgaccataggcaatccatcttcttgtgtcagcaatttctggacacccactgttttccaccaagagctgaggtggcaacaactcagtgagcaataaacaaaatgacacagaaatgcacagtgttgttatgaaggagcctgtttacctgtgttcaaaatctggcaccattcccttgagcagggcccgctcaggagggaccaggtctgccagtttctgtgcctgcagagagacgaagccccacgagccacaccctactctacaagaggaaagggggttggatgggaagaatctattttgctgttttggaaagcacacagccgacctacaaacctcctgtgatggtgtttcttcggatgtgtaaaataaggctttatttgtcaattccgctgtaaaataagcattgtccgagtaaaaacagcagcaacaacaaaa

SEQ ID NO: 792 - DNA, 643 bp, Homo sapiens; identical to SEQ ID NO: 791

SEQ ID NO: 793 - DNA, 422 bp, Homo sapiens
caaactgaaagtggaaaaatttaaatttccaatttattctagatttcctcagagcataattattctgttaaatcctcaatgagtgtgatgtaaaccacctctatccagaaatatacattcttttctcatcatgttggacacagttgagggtgacatgcacagaactggaacagatcactattagtggaaaataccaaatggacaaataaataccagtcgttttctccgttctccaagcacaggagccaggtttaccatctgaacaatgaagacgaagggagtaaataaaggaagaattctcatcttttttcctgatcattcaaagaacagtttctcaaggttaagccaagtcctccttgcaagttgccaaataatagcttaggaaaagaattagtctgcctgcatgatgatcttcttaggca

SEQ ID NO: 794 - DNA, 422 bp, Homo sapiens; identical to SEQ ID NO: 793

SEQ ID NO: 795 - DNA, 1375 bp, Homo sapiens
aaggcagtattgaccagacatttctatttcagagttggatttgtgcttagttttttttaggtgttgggacccttgtagttgctttttattttgcttagtcaacaaacactaaaatgataaaatttggtatgtataagtactggacgaaggatgttttgacactaaaaaggacataatttaggaaattaagaatttagacaccaagtttggcttaatagaaaaagtcactatctgaacttctttctttttcaccacaaatcaccgcagaccagtgtttgggagcaggtgtaggaaattgaattattggatctatgtttaggtaagaaaactaaaggtacttcagaatttaggctatgacataactgtctttctgaagtttaaagaaagaaagtgaactatagaaatctattcagctaattaaagtgaatgaaaaatattacagattccataactgcatggcgccttacctgctattaatactgccgccttactgtcagccagatgattttttcccaccacggccagtcttaaatttggcaataagaaaaagctaatcttccaagtgtaagtaggtatgtgttagaatcttggtgaaagataaacacaagacagtcttcttggcgcaggtcctaacagttggtgagataatacataagatggtttcaggattattgtagaattatttaggttgaaagagactgtaagagactaatgaagcatactcagagaggttgctacagtgactccagtcagttttaggacccaggactcctgaacttcaatttcagtattatttttctgtaccaaactcattcaataaatacttgagattagggataagtttgaagttagaagattccagagtacactcaaatagtatttggcacatagcttgttgatcaaaagtatttactaagtgagtgacaaaaggcactagcaactttaaggattttgcctattagtatcatatggcatgtagctatcaagccagtttcgtttagttattttgtgttgccaagcatatgatacgtggtgtcacactgagcctttgggatcctttccctggatacataaccctagtagataatgttactgcaagatgtaatgaccaaatccaacctactgcaaatgttactatggaaatctcaatgcaaaagtagcctttgtgattttttttttaaaccgtctccataacagaacacttagaattattagccatttgctgcaaagtatttgttttaaaatgtctggcatatacaccactaacatttaaatgcccaacattcggtctatacgtgaaaaaactagaagaaaagccctgttggagttttgatgtagagtgcaataatacatcaataaaggtattttaaaatga

SEQ ID NO: 796 - DNA, 1375 bp, Homo sapiens
aaggcagtattgaccagacatttctatttcagagttggatttgtgcttagttttttttaggtgttgggacccttgtagttgctttttattttgcttagtcaacaaacactaaaatgataaaatttggtatgtataagtactggacgaaggatgttttgacactaaaaaggacataatttaggaaattaagaatttagacaccaagtttggcttaatagaaaaagtcactatctgaacttctttctttttcaccacaaatcaccgcagaccagtgtttgggagcaggtgtaggaaattgaattattggatctatgtttaggtaagaaaactaaaggtacttcagaatttaggctatgacataactgtctttctgaagtttaaagaaagaaagtgaactatagaaatctattcagctaattaaagtgaatgaaaaatattacagattccataactgcatggcgccttacctgctattaatactgccgccttactgtcagccagatgattttttcccaccacggccagtcttaaatttggcaataagaaaaagctaatcttccaagtgtaagtaggtatgtgttagaatcttggtgaaagataaacacaagacagtcttcttggcgcaggtcctaacagttggtgagataatacataagatggtttcaggattattgtagaattatttaggttgaaagagactgtaagagactaatgaagcatacccagagaggttgctacagtgactccagtcagttttaggacccaggactcctgaacttcaatttcagtattatttttctgtaccaaactcattcaataaatacttgagattagggataagtttgaagttagaagattccagagtacactcaaatagtatttggcacatagcttgttgatcaaaagtatttactaagtgagtgacaaaaggcactagcaactttaaggattttgcctattagtatcatatggcatgtagctatcaagccagtttcgtttagttattttgtgttgccaagcatatgatacgtggtgtcacactgagcctttgggatcctttccctggatacataaccctagtagataatgttactgcaagatgtaatgaccaaatccaacctactgcaaatgttactatggaaatctcaatgcaaaagtagcctttgtgattttttttttaaaccgtctccataacagaacacttagaattattagccatttgctgcaaagtatttgttttaaaatgtctggcatatacaccactaacatttaaatgcccaacattcggtctatacgtgaaaaaactagaagaaaagccctgttggagttttgatgtagagtgcaataatacatcaataaaggtattttaaaatga

SEQ ID NO: 797 - DNA, 99 bp, Homo sapiens
gagttttgctcttgttacccaggctggagtgcaatggcgcaatcttggctcaccacaacctccacctcccgggttcaagtgattctcctacctcagcct

SEQ ID NO: 798 - DNA, 4119 bp, Homo sapiens
gatattttctgacatggtatttggttttgggtatctgttactttggcactattcttgtttgcctctttatttttgccagtgtactatacctcagtcctatttgaaagacctaattgaaagaaaaatcatagaaataagtaaaatgatttgttttataatttatccaccatgtccagtttggttagcttgttatgcaatataagtgaaatatcaggtttttacccgtgtcccttttatcatgaaaattaacacaaaatgtgcattctcttttgtttcatacttagcgggatattgattgttttgaaattatgatcaatacttaatttatttttttctgtccttgaagtcactacaccttgatacagtctttctagtagtcaccatgattcaacagtctcaaaaatcttacaaataaaattctgagaagctttattattctataaattcttcagggtacaaagggtgacatattgaggtgaaattgtcagatttacttagcctggtgacatgaattagctgattgtggaactctcagcagcatttcacgtattgttaacatgtatggcatttattagcatattgtatattatataagattgagggatgtcatattttcagctttcttttaaataaaaattgagtatattttcctattttatatcaggtaactaaattatgctagttatgtggaaaaaattgcaaagatgctttgacagatataatccctttggtgctccatctgatcaaagttgaaaagttgatgttttttaagagacaagctttatcattgtctctgatttcagtagaataatggtttattgttagacaatgatgtttctgcttggataaatcaaagataaattacagttacatggttagatgcatcttttgtcatctatattgtagtttctacataactgtaaacctgacagataagaatagtttcggtttgatttttgtttaaaacagatgagtacttcttaatgttctagacaaatgagtaaaatgtatttctggtagaaattagttgggcaaagatactatgaatgaaaaagtattttaaacgtaaaatgttctttgtgaatatgtaagtatagtataaagatttctttcatcccatttatccccttcctttaaataaactagtttacaattggtagatctgtctatatataaatatatattaaagaacaaagatatatatctaaaaatcacctaaatctgctttattagactacagttcacttattgcatagaaactggacttggctttacattcttaatgtacttttacttttcctcaagatatgaacttactctcttgaagctgaattttcttttactacttaaatcatttatgtatatctggtaaattatgaccaaatttttgttagattgcatacagtaaattgaaatacacacttggtacactacgggattgttgtgcttttgtttggttttagttggaaataaggtttgatgtagatggcttgttactgttaatttaaaatattctataattgtccattactttatgttgtgttgtgacagatttggctatatttttagtcaattgaaatatgatactttaaaagtttgtttttaggtaatccaaaggaaaagtgtttatactcttgaatatattagcctcagcctatataaaaatttctttgaagtaaacattttaccggaaacagaattgacacatttttctacttgctgactgcctaacttattttgtttcatgatctcgagggactgccttttcccatctagatcttttaaaaaaatagttttagtactaaggtatactactggacatttctatttttttaagtgtattctttttctgacttacagtaaaatttcaggaagttgatagatactaagaacttatgattggtctcagaggtaacaatgaaatactcataattttgtctgtggaactctggcagaattatgttacacatttggcgaagttgtctcttgtaatttatattttaaatgaaaaagtattttagagcttttaatgaaggggaagagtataaactttctttcatattcactctgtagttacagaccgtctcataaatcaagattgtgcattattagagttctcagagacagatacttccatatggacccctgttcatttttcttatttactagatattttgctaaatttagcacactagcaattaagagtttaaaaaagaagaaacgttataggaaagggaaactgaacagtaatgagtagctttgaaattggggaaaacacactagctgggttaggtacagctatcctaatggagaagagtgagctaaatgcgttaattcatgtaaagtgcttagaacactggtacataataggtgcataacacatcttaaagttgtttaataatagataagaaccaagaggaaaaagaaataagaaaagatgggggaaaggaaggagaaaataggaaatgaaaggattaggacttgggcatttatattaatacaaaatggtgtaaacggcctgaatatcactgtagtagtatcatacgggggaaagtgtgatggaaaataggtttaaaaatcttaatttttaaaactttagtaagctttatttatattttttaggattttctgaacatagcatgaagggtttagattcatttttctgaaaaacgattaaaaaaactaccaattttttttttgagtgcccacacttgccgttgtgctgtatacatgattttaccttaatcctctataaggtaggtgctaattgtctccattttatagatgaggaaaggctcagagaaattcagaaacttggctaatttaacacagctgtgacagagctcgaatttgaccacgtctgattctgaagcccatactctttcagggaggctctattgctgcctcattaaacaactcttgtagaatttcagctcttaatggagtctatggattatatttttcctataagacagctgtgtttagaattttgagtgtctttcctccccccaataaatttccttactactctttcttcataaagcagttgttttgtcactttgactatattaagacacatcagtgtagcacatgctcttaactggctgtggcattttaattttataaaagaatggtttttatctgaagaactagatagaaaccccagtttttgtgccgttcagtcacccagatccttaaacttaactatggtacataatatccacacttagaactaacaggtgtttagtcactttaggacttaaaatggaaagtttttttttttttcctgctgtatctctgctttcaactgaagttaaagaattctagatagtttaaaatgtgttagggataagcacacttcaaaagatgttttctagccctaaattttatgacattgggtacttaaatttggagtacactagctattgagaacaatattttgggttgaggagagatggttgaggccattatttagtgggagcattggcattttgaacactgtaaacaaaagaacacttccgcctgctgtttgtaaaagctctttgggaagatcttttacgaagaccaactttttaaatgtaaattacctacctaatataagtgtcctaagacatgtatgtaaacttccggaactgttttgtctgtgtatttagaaaatacacaagaatctttattcaaacctaaaaatataaacttgtgagcactaaactgcttctggctttgtgaattttattgactgacatttaattcagatttctttgcaagtgtactaatttagactaattggggtaaggggaacaccttaatgaactttgacttatgtataattcagatatctttgtacttaaggcttacaagtttgaattatggaatactataagggttttttgtttatttgtatgtttttatatgaaagtacataaatgacagactacctccaagtaatcctgctttaattaatagcagtgatttgtaatcagtgtatcttttaagattctctacaggttttagaaaatattaaaaattccctgtaatttacatttgtgcataatcttggaaatgggttgaaaagcaaaggtaaactgcttcatcccatgttgtatatttgtggactgattg

SEQ ID NO: 799 - DNA, 99 bp, Homo sapiens; identical to SEQ ID NO: 797

SEQ ID NO: 800 - DNA, 5961 bp, Homo sapiens
taccaggtgcttcaaatgatttcaagtatggattattgccagaatcttggccaaaacaagaaacctgggaaaatggcaagtattagtcaactaaacaaatacagaattaattaaataattgttaacaattaaaagctttcatgttctgcattttttaaaaaccaagtagcagtagctccacataattgctgttctcagagatagagataagaagttttgatagcaagttttctgtttaatgtgtaataagcactttctctttttttaattctcataggtgaatcatctctaatcatgaacaagttaaaatgccctcattgtagctatgtagccaaatacagacgaacactaaaaaggcacttgctcattcacacaggagtgagatcatttagctgtgatatttgtggaaaactgtttactcgaagagaacatgtaaaaagacattccctggtaagtaactttaaatacagctgatctttgagataaactatatttatgtcagtgaagtttaaagggatttaaacagttaattgtgaatttaaggaagattgtctcctaaattgctttaaacagtttgactttatgaactgatagtgagctttttacagagaaactggtgtattcactcactattaaatgtgtggtttaatttgagtggttcaaatgcattctattatatataatatccttatattggattttttccccctccaattaggtgcataaaaaggataaaaaatacaaatgtatggtgtgtaagaagatcttcatgttagcagccagtgttggaataagacatggatctcgacgttatggtgtttgtgtagactgtgcagataaatcacagccaggagggcaagaaggtgtagatcagggacaggatacagaattccctcgggatgaagaatacgaggagaatgaagtaggagaagctgatgaagagctagttgatgatggagaagatcagaatgatccctctcgatgggatgaatcaggagaagtttgtatgtctctagatgattaactgacctactatactcctcaaggatgctgcatttggacctaatatgaatcgacaatttggattgttgaacttgaaggcttgcaaaatatggtacatgctggatagtagttatgttgctgtgaaaactgtagggtcaaagccttatagcaaaaaaaatttttttttatatttgcacaggactatacagcaaacaaccatgtggttggattacatggagtccccacatactcagtcagttatcaaagtaaaatattttttatttataggatatacagtaactatttgggtcctatgaaaatagtccttaaagagcttacattcatgtgctactttaacatgaatggagaaaatccgtttatggaagtacagtgacaattgacccaatcactctgtccatcaaaccactcaggctagtttgtactagtagagttttgtttctatttttatttttattaattttattttttttaatacagattttcagtgaggggctttttcaaccccattggttctattttcttgtatttttccatttaatttgcttcataacttaaaccaagtctcttctagtcttaggtattatttctcgattttgtgctgatgggcatgtttataagaactggagaggtaatttattggaatgaactaactgacttcctccattcccctcttcctttttgacatgaattttactacttcacaaatgaagaatgatgttatgaagttaccgtggcgaagttgacaaataccactaaaatgattatgatttagaagtaactttcttctgctgctctaatctgataaatggttactatatgatattttctgacatggtatttggttttgggtatctgttactttggcactattcttgtttgcctctttatttttgccagtgtactatacctcagtcctatttgaaagacctaattgaaagaaaaatcatagaaataagtaaaatgatttgttttataatttatccaccatgtccagtttggttagcttgttatgcaatataagtgaaatatcaggtttttacccgtgtcccttttatcatgaaaattaacacaaaatgtgcattctcttttgtttcatacttagcgggatattgattgttttgaaattatgatcaatacttaatttatttttttctgtccttgaagtcactacaccttgatacagtctttctagtagtcaccatgattcaacagtctcaaaaatcttacaaataaaattctgagaagctttattattctataaattcttcagggtacaaagggtgacatattgaggtgaaattgtcagatttacttagcctggtgacatgaattagctgattgtggaactctcagcagcatttcacgtattgttaacatgtatggcatttattagcatattgtatattatataagattgagggatgtcatattttcagctttcttttaaataaaaattgagtatattttcctattttatatcaggtaactaaattatgctagttatgtggaaaaaattgcaaagatgctttgacagatataatccctttggtgctccatctgatcaaagttgaaaagttgatgttttttaagagacaagctttatcattgtctctgatttcagtagaataatggtttattgttagacaatgatgtttctgcttggataaatcaaagataaattacagttacatggttagatgcatcttttgtcatctatattgtagtttctacataactgtaaacctgacagataagaatagtttcggtttgatttttgtttaaaacagatgagtacttcttaatgttctagacaaatgagtaaaatgtatttctggtagaaattagttgggcaaagatactatgaatgaaaaagtattttaaacgtaaaatgttctttgtgaatatgtaagtatagtataaagatttctttcatcccatttatccccttcctttaaataaactagtttacaattggtagatctgtctatatataaatatatattaaagaacaaagatatatatctaaaaatcacctaaatctgctttattagactacagttcacttattgcatagaaactggacttggctttacattcttaatgtacttttacttttcctcaagatatgaacttactctcttgaagctgaattttcttttactacttaaatcatttatgtatatctggtaaattatgaccaaatttttgttagattgcatacagtaaattgaaatacacacttggtacactacgggattgttgtgcttttgtttggttttagttggaaataaggtttgatgtagatggcttgttactgttaatttaaaatattctataattgtccattactttatgttgtgttgtgacagatttggctatatttttagtcaattgaaatatgatactttaaaagtttgtttttaggtaatccaaaggaaaagtgtttatactcttgaatatattagcctcagcctatataaaaatttctttgaagtaaacattttaccggaaacagaattgacagatttttctacttgctgactgcctaacttattttgtttcatgatctcgagggactgccttttcccatctagatcttttaaaaaaatagttttagtactaaggtatactactggacatttctatttttttaagtgtattctttttctgacttacagtaaaatttcaggaagttgatagatactaagaacttatgattggtctcagaggtaacaatgaaatactcataattttgtctgtggaactctggcagaattatgttacacatttggcgaagttgtctcttgtaatttatattttaaatgaaaaagtattttagagcttttaatgaaggggaagagtataaactttctttcatattcactctgtagttacagaccgtctcataaatcaagattgtgcattattagagttctcagagacagatacttccatatggacccctgttcatttttcttatttactagatattttgctaaatttagcacactagcaattaagagtttaaaaaagaagaaacgttataggaaagggaaactgaacagtaatgagtagctttgaaattggggaaaacacactagctgggttaggtacagctatcctaatggagaagagtgagctaaatgcgttaattcatgtaaagtgcttagaacactggtacataataggtgcataacacatcttaaagttgtttaataatagataagaaccaagaggaaaaagaaataagaaaagatgggggaaaggaaggagaaaataggaaatgaaaggattaggacttgggcatttatattaatacaaaatggtgtaaacggcctgaatatcactgtagtagtatcatacgggggaaagtgtgatggaaaataggtttaaaaatcttaatttttaaaactttagtaagctttatttatattttttaggattttctgaacatagcatgaagggtttagattcatttttctgaaaaacgattaaaaaaactaccaattttttttttgagtgcccacacttgccgttgtgctgtatacatgattttaccttaatcctctataaggtaggtgctaattgtctccattttatagatgaggaaaggctcagagaaattcagaaacttggctaatttaacacagctgtgacagagctcgaatttgaccacgtctgattctgaagcccatactctttcagggaggctctattgctgcctcattaaacaactcttgtagaatttcagctcttaatggagtctatggattatatttttcctataagacagctgtgtttagaattttgagtgtctttcctccccccaataaatttccttactactctttcttcataaagcagttgttttgtcactttgactatattaagacacatcagtgtagcacatgctcttaactggctgtggcattttaattttataaaagaatggtttttatctgaagaactagatagaaaccccagtttttgtgccgttcagtcacccagatccttaaacttaactatggtacataatatccacacttagaactaacaggtgtttagtcactttaggacttaaaatggaaagtttttttttttttcctgctgtatctctgctttcaactgaagttaaagaattctagatagtttaaaatgtgttagggataagcacacttcaaaagatgttttctagccctaaattttatgacattgggtacttaaatttggagtacactagctattgagaacaatattttgggttgaggagagatggttgaggccattatttagtgggagcattggcattttgaacactgtaaacaaaagaacacttccgcctgctgtttgtaaaagctctttgggaagatcttttacgaagaccaactttttaaaatgtaaattacctacctaatataagtgtcctaagacatgtatgtaaacttccggaactgttttgtctgtgtatttagaaaatacacaagaatctttattcaaacctaaaaatataaacttgtgagcactaaactgcttctggctttgtgaattttattgactgacatttaattcagatttctttgcaagtgtactaatttagactaattggggtaaggggaacaccttaatgaactttgacttatgtataattcagatatctttgtacttaaggcttacaagtttgaattatggaatactataagggttttttgtttatttgtatgtttttatatgaaagtacataaatgacagactacctccaagtaatcctgctttaattaatagcagtgatttgtaatcagtgtatcttttaagattctctacaggttttagaaaatattaaaaattccctgtaatttacatttgtgcataatcttggaaatgggttgaaaagcaaaggtaaactgcttcatcccatgttgtatatttgtggactgattg

SEQ ID NO: 801 - DNA, 1034 bp, Homo sapiens
ccgggcgcggtggctcacacctgtaatcccagcactttgggaggctgaggcgggtggatcacgaggtcaggagattgagaccatcctggccaacatggtgaaaccccgtctctaccaaaatacaaaaaattagccaggcgtgacggtgcgtgcctgtagtcccaactactcggaaggctgaggcaggagaattgcttgaacccgggaggcagaggttgcagtgagccgagatcgcaccactgcactccagcttggcaatagagtgagactccatctcaaaaaacaaaacaaaacaacaacaaaataaactactgtggcagcgttggtaccctgcatcactgccatggttgtgctattctcatctcaacatagaattggtgggttctcctaagggtgtcaggaacctctaaaaagatgtgattctttgggaggggatatttgaaattccaacttccattccccctagcaaaaggaagcagctgctgtttaagggttttatctgagccactttaaagatgaatccatggtattactctggatactagccattccttaggattttaaggtcacattttattcctggatgctttatgtccccacctccacctgagccctcatcctctgttccctactatactcccaacttctactctttgttttatccacctatccctattacctgaccctttgtcttccctgtctcccatccttggggggacatgtagccctgtggtcatggttctgatgacatcatcagggcagcccccctgcccaggtattatggcctgtcagcattccctgtgccctccaaaccttaggcctagaatgcggagctgccaacataacattcacccttttgaacagatggagtcaggcacactaacacagccttctgtcctcaataacacagccattattgccacttgctcagtcgtcaatgtaaaccctcagagtcagctgaactattttaggccaaacatactgtttttgtaaagtatttttcattaataaatctataagacagttctatttaa

SEQ ID NO: 802 - DNA, 3214 bp, Homo sapiens
tttctcctcggtccccaactctaccttccccaaccacagttcctgtccccagatgtcctgatgcccaccatggcaggggagcccaatagactcccaggtaactcccccaaatctaatattatatgccagaatttggtaccttttcaggggcctccaagggtcaaatcagtatacctatggggaggggggtatcccaaggtggagtggtgtgaagatatgaattactgcttcaaagtcgtgcatttatctagataaatattaaatcatttgttgggcaccatgattcttagaccaagggtttagaccagcacccctagagtctgtctacttacgaaaatgacctgcttcagtcatgacagaataagcttttaactgacaaaggggagttaatacccagtctttgggacatccccagaacagaaatggtcatctctccttctatcctctgagctagttttctccccttctatcctctgagtctcagctgagggatggtctaggaagataaggaatgagtgggagaattggaaagaccctttacatggagtacccacaccatgtgtacagacccagacaattgtggggaaggtgggcaatatcattttggctttctttgaccttccgagtgagatgttctcttttttcccctcatgcactggatgtacaagcttgaggcagtggttctcaatggataaaggggatgtaccaccggtatctagtgggtagaggccagggatgtcctcaacagcacagccattattgtcacttgctcagttgttgttgtaaaccctcagagtcagctgaactattttaggccaaacatactgtttttgcaaagtatttttcattaataaatcacacaatgcacagggcagtctctccccaaccccaacaaagaattatcagcccaagataccaagagtgccaaagttgaataaatgtataagaaaaggcattccacattagatctcagagatcaaacaaaggcagcttaactgaagtgaaggtaacattttaagaaaagttggagaaacaaaaaaaaagcaaggcacagcgtctcacacctgtaattccagcactttgggaggccaagatgggaggatgacttgagtccagcagttcgagaccagcctgggcaacacagtgagatcccgtctctattttttttaaaaagaaaagctgcgtgaggttttggtatggtggctctaggagtatagtcatcacaaagggagtatacgtttgccatatattgctatatattagggagcccttcttttgtaggtgtgtgtatagtggatgagagattatagtggagggaggtagaggtatggcaacatccatgagactgtttcatttgcccaggttggaggtatgagatttgattttgatgtatattaagaattttaagaaatggaatcaaaagcacagcttgattcattctttcccttgtatgtatgctcttggaggagtagggaattgggctacacagctaggcatggctctctgggaaggagaatggttttctgaagatgctcagtctttgggtttcttttctttccccaggaacttcaaggagtgtccagcagtttctggctatgtgtgacaggggtgaaacttcccaaggggccaagtacacaggaaggactttgaactaccagagcctcccccatcgctccagaacagacaactcctgggcaccctggtcagagaccaaccagcatattgggaccagattcctgactactccagggtgcaatcctcaactaacctacactgccacactaccagaaagaagcaagggccttcaggttcctcacactcagtcctggagtgatcttttccattcaccctcccaccctcccattgttcatcctgtgtacccaccatctagcagtcttcatgtacccctgaggtcagcttggaattcagatcctgttccagggtcccgaacccctggtcctcgaagagtagatatgcccccagatgatgactggaggcaaagcagttatgcctcccactctggacacaggagaacagtgggagaggggtttctgtttgttctatcagatgctcccagaagagagcagatcagggctagagtcctgcagcacagtcaatggtaaaggttattcctttcctttcctggagctacacctttctttgtaaaactgtactgtgggccgggcgcggtggctcacacctgtaatcccagcactttgggaggctgaggcgggtggatcacgaggtcaggagattgagaccatcctggccaacatggtgaaaccccgtctctaccaaaatacaaaaaattagccaggcgtgacggtgcgtgcctgtagtcccaactactcggaaggctgaggcaggagaattgcttgaacccgggaggcagaggttgcagtgagccgagatcgcaccactgcactccagcttggcaatagagtgagactccatctcaaaaaacaaaacaaaacaacaacaaaataaactactgtggcagcgttggtaccctgcatcactgccatggttgtgctattctcatctcaacatagaattggtgggttctcctaagggtgtcaggaacctctaaaaagatgtgattctttgggaggggatatttgaaattccaacttccattccccctagcaaaaggaagcagctgctgtttaagggttttatctgagccactttaaagatgaatccatggtattactctggatactagccattccttaggattttaaggtcacattttattcctggatgctttatgtccccacctccacctgagccctcatcctctgttccctactatactcccaacttctactctttgttttatccacctatccctattacctgaccctttgtcttccctgtctcccatccttggggggacatgtagccctgtggtcatggttctgatgacatcatcagggcagcccccctgcccaggtattatggcctgtcagcattccctgtgccctccaaaccttaggcctagaatgcggagctgccaacataacattcacccttttgaacagatggagtcaggcacactaacacagccttctgtcctcaataacacagccattattgccacttgctcagtcgtcaatgtaaaccctcagagtcagctgaactattttaggccaaacatactgtttttgtaaagtatttttcattaataaatctataagacagttctatttaa

SEQ ID NO: 803 - DNA, 615 bp, Homo sapiens
gaacttcaaggagtgtccagcagtttctggctatgtgtgacaggggtgaaacttcccaaggggccaagtacacaggaaggactttgaactaccagagcctcccccatcgctccagaacagacaactcctgggcaccctggtcagagaccaaccagcatattgggaccagattcctgactactccagggtgcaatcctcaactaacctacactgccacactaccagaaagaagcaagggccttcaggttcctcacactcagtcctggagtgatcttttccattcaccctcccaccctcccattgttcatcctgtgtacccaccatctagcagtcttcatgtacccctgaggtcagcttggaattcagatcctgttccagggtcccgaacccctggtcctcgaagagtagatatgcccccagatgatgactggaggcaaagcagttatgcctcccactctggacacaggagaacagtgggagaggggtttctgtttgttctatcagatgctcccagaagagagcagatcagggctagagtcctgcagcacagtcaatggtaaaggttattcctttcctttcctggagctacacctttctttgtaaaactgtactgtg

SEQ ID NO: 804 - DNA, 652 bp, Homo sapiens
aaaaaaagaagaaaggaataattagctgtgtcacatgctgagaggactggcacctggtccttaggcagtatgataaatgcttactttgtgccattttgtagtaggtgctgtgagcatacactgatgaaacaacacaaattctgcccttgagtagcttgcagtctcgtaaaggaaattagacatactggcatatagattattttatttaatgtattattactaagtgcccacattgttctaggcactgttcaaggtgctgcggatacagaagtaaaaagaaataggggagaagacaataaacaaataaatgacataatgccagacaatgataagtatgataaagaataataaggcaagagaataaagagtaaagaggtaatagtggtttttttgagggctattcctgatagtagggtagtgagggaaatcagctctaaggaagtaacttttgattagagatctcagtgatatgaaagtatgagccatcagaagaatattcttggtaacagaaacaggaagtataaagactctgaggtagcaatgagcttggtgtgtttgaggaatattaaagttagagtgtaaaagctccaggaatgataggaaataaagtgaggagcagcagggccatatcacacaggaccttgtaggccac

SEQ ID NO: 805 - DNA, 866 bp, Homo sapiens
aggaattaatttccaattccctatttactcctctgccttccaggaggaggttgtatccttttcaggtgaattcttcagattctttgcacatctcttggtgtcatcccctttattccccttacctgttttgacaaactatggcgcctaaattgctctagctgcagtcttattctgtgctttcagactcttgacaattccagactctaaacacaaaggccagaattctctttcaaactccattttggatggtcccttctccactctagaacctacaatgcttcctctattctctggtcccctaccaacccttcagtattcagatctggtagctaaatcgttatacatttctctattagtaggagatcctgaggtttaatcacgtcttctcagtttactgggaatgccatgagagcgggtgtgtttcctcgcagtcgttcgatcgcagcacctcctcattcttcattctgcatgcaaagaattttaacctgatcccttggcctcgtcctgtttctctcctagcttcagtaattttgcccaagtccctagagcctaccccgcccccacccccgcacgcgcagtgcatgccggtcttagcccctctgtagggaaagagggtccgccatgttccccggcggcgccgccgcttggctctggtagccgccgcccccgcccccaaccccgcccggcccagagcctagccgagccccgggcccagcatggccgccccggagccggcccgggctgcaccgcccccacccccgcccccgccgccccctcccggggctgaccgcgtcgtcaaaggtgagaggtggacgaaaccctgggggcctggcctgaagagctagctgtgtgtgagggcgggcggg

SEQ ID NO: 806 - DNA, 2176 bp, Homo sapiens
cagctttgcagccaccttggtcagccctaaggccgagcccaccgcctgcaaggtgcagccgtcctcactcccctcatctctctctctcctctcccctctgcatttctctcttctccagaccagctcctccactgtggctctgagtgccccggggctgtccagctctgctccgtcctcatactgctcccttcctccttctcctcctcccatgccatctgtatttctgccacccaccactataccctcccctcgaggccagggccacactccggagttcccttgtactgagcagagtggacgaggccttctacctcctgtagcccccagctggcttgatttggctggtcttggggtgatgcctgacaccttcaactcaaggtctccctctgtggagggttctctgtgggcagtgggcacagagagtcagggtcgagattggaggcacctgccgaccatcacaagtgagctctctggggctccccgctgccacactgtaccctgtgctgggagcacagctctccaagagcctggggagccccagggggccaccagccagcccttcgtgcccagaggaggccttggctgccacatgggagcagccatgggcttcggaggtattcgggcctgagagaatgcccccctctggagctgctcgaagcttccaagaagtaacagagccagctgtagtggcagtggaccggcaggccatcttcccagatacctggactctcacggaggaacatggcctacagcaggagaggccaaggccagagccagggaggctgggaagcagctcccctgcctcagttaccacggagcagctaggtgcaaagatgaccgagaggggaagtgtggccaggccaacccagggacctgaaaccccaaggagcccagagggcaccacggaagctgccacccaggacgggaaggaacagccagagcttccatgtgccatggccatgggcacacccagcaccacggagaggatttccacctctggccaggcaggcaccagctcgcatggctgctgggcatggccattggcgggtctgagtgtgggccgctcctcgctaactgcatgcagcctcccactctgcgcatgtctgcttgggcagaaaatgctgagacactgtggccggacctgacagtcagcacttggcagtgggctctgtggacccagcatttctcatagcgtcaacccacctcttgccttgttgaggctttttcctttcagatgagctgtccttgacattctgatgtggtgaaatggttagcagcatggactttggaaccagatagacctagatacaaaccacatgtctaacacttgctacctctgtgaccttgggcaaccccctccctcagcctcagttttctcatctgtaaagtggggagaatttccatcaagattgtccggagacctaaatgagataattcctggaaagtgtttagaacacagcatgtggtccctcaataggccgtggctgacagtacttttattacttgctttttgcttaaattaaaactttatgccgggccaggtgtggtggctcacgcctgtaatcccagcactttgggaggccgaggcgggcggatcacctgaggttgggagttcgaggccagcctgaccaacatggagaaaccccatctctactaaagatacaaaaagattagctgggcatggtggcgcatgcctgtaatcccagctactcaggaggctgaggcaggagaatcacttgaacccaggacgcagaggttgcggtgagccaagatcataccattgcactccagcctgggcaacaagagtgaaacttggtctcaaaaaacaaaaacaaaacaacaacaacaacaaaaaactttatgcctcaccctggcacagtagcttatacctgtaatcctagcactttgggaggctgaggcaagaggatcgcttgagcccaggagtttgagaccagcctaggcaacacagtgaaaccctgtctctacaaaaaattaaagattagctgggcgtggttgcacatgcctatagtcccagctgctggggaggctaaagcaggaggatggctttagcccaggagtttgaggctgcagtgagttgtgatcgcaccactgcattcagcctgagcaacagatcaagacactgtctcaaaaaaaaaaaaaaaaaaaaatcccccaa

SEQ ID NO: 807 - DNA, 2174 bp, Homo sapiens
cagctttgcagccaccttggtcagccctaaggccgagcccaccgcctgcaaggtgcagccgtcctcactcccctcatctctctctctcctctcccctctgcatttctctcttctccagaccagctcctccactgtggctctgagtgccccggggcgtccagctctgctccgtcctcatactgctcccttcctccttctcctcctcccatgccatctgtatttctgccacccaccactataccctcccctcgaggccagggccacactccggagttcccttgtactgagcagagtggacgaggccttctacctcctgtagcccccagctggcttgatttggctggtcttggggtgatgcctgacaccttcaactcaaggtctccctctgtggagggttctctgtgggcagtgggcacagagagtcagggtcgagattggaggcacctgccgaccatcacaagtgagctctctggggctccccgctgccacactgtaccctgtgctgggagcacagctctccaagagcctggggagccccaggggccaccagccagcccttcgtgcccagaggaggccttggctgccacatgggagcagccatgggcttcggaggtattcgggcctgagagaatgcccccctctggagctgctcgaagcttccaagaagtaacagagccagctgtagtggcagtggaccggcaggccatcttcccagatacctggactctcacggaggaacatggcctacagcaggagaggccaaggccagagccagggaggctgggaagcagctcccctgcctcagttaccacggagcagctaggtgcaaagatgaccgagaggggaagtgtggccaggccaacccagggacctgaaaccccaaggagcccagagggcaccacggaagctgccacccaggacgggaaggaacagccagagcttccatgtgccatggccatgggcacacccagcaccacggagaggatttccacctctggccaggcaggcaccagctcgcatggctgctgggcatggccattggcgggtctgagtgtgggccgctcctcgctaactgcatgcagcctcccactctgcgcatgtctgcttgggcagaaaatgctgagacactgtggccggacctgacagtcagcacttggcagtgggctctgtggacccagcatttctcatagcgtcaacccacctcttgccttgttgaggctttttcctttcagatgagctgtccttgacattctgatgtggtgaaatggttagcagcatggactttggaaccagatagacctagatacaaaccacatgtctaacacttgctacctctgtgaccttgggcaaccccctccctcagcctcagttttctcatctgtaaagtggggagaatttccatcaagattgtccggagacctaaatgagataattcctggaaagtgtttagaacacagcatgtggtccctcaataggccgtggctgacagtacttttattacttgctttttgcttaaattaaaactttatgccgggccaggtgtggtggctcacgcctgtaatcccagcactttgggaggccgaggcgggcggatcacctgaggttgggagttcgaggccagcctgaccaacatggagaaaccccatctctactaaagatacaaaaagattagctgggcatggtggcgcatgcctgtaatcccagctactcaggaggctgaggcaggagaatcacttgaacccaggacgcagaggttgcggtgagccaagatcataccattgcactccagcctgggcaacaagagtgaaacttggtctcaaaaaacaaaaacaaaacaacaacaacaacaaaaaactttatgcctcaccctggcacagtagcttatacctgtaatcctagcactttgggaggctgaggcaagaggatcgcttgagcccaggagtttgagaccagcctaggcaacacagtgaaaccctgtctctacaaaaaattaaagattagctgggcgtggttgcacatgcctatagtcccagctgctggggaggctaaagcaggaggatggctttagcccaggagtttgaggctgcagtgagttgtgatcgcaccactgcattcagcctgagcaacagatcaagacactgtctcaaaaaaaaaaaaaaaaaaaaatcccccaa

SEQ ID NO: 808 - DNA, 449 bp, Homo sapiens
ccaaaaacccccaaaacactaccaacaagtataatagcataatataatattagcataataatataaataagaaaaaaaaaactagttaaaaaagttcctggctagctgagcacggtggctcacacctgtattcccagcactttgggaggccgaggcaggcagatcacgaggtcaggagtttgagaccagccgaaccaacatgatgaaaccccatctctactaaaaaaaaaaacaaaaaacaacaacaacaaaaattagccaggcgtggtggtgcatgcctttaatcccagctactcaggaggctgaggcaggagaatctcttgaacccaggaggcggaggttgcagtgagaccagatcgcgccactgcattccagcctgggcgacagagcgagactctgtccccccccaaaaaaaagttcctggaaggaaacactttttctattataaa

SEQ ID NO: 809 - DNA, 849 bp, Homo sapiens
ctcccacgctagctgtcctcaacacatcctctttctttctgcctctgatcctgaatccacaagcctcccttgctactcttctcccatccttccctctcgccctccagggcctctgagttcccacgagcgtgtctgtgggaaaccatggggccaggcttgcacgaggtacctgcccttcccctcccctgctgggcctccccagtcctgccaggcctgagatgtttaatttagaggattcagtgtttccttggggattgatattgacagaactcaccagcagctgctgacttcatacttccacgtgggtcagctggagacctttggggcatgacctagggaatatgagaggggagtgaacggtccctgcacccttggccctgatggtgtctcctagcctcccttcagctgaggtttcatggtgggagacaggagtgtggctggggtggagggttgagcctggccctgtgacccttgcgtgctatagttccagctccaggccagtggttctgagcagccatggtcagaagcaagtaagttggattcagggcctggcctgagggagctgtgccccggtgcttttaaggctgccgttttctcagacagcctgtgtcctgatgccaggagaagcagcagtggttttagtcagatccctggagcaaggatgtggaagacgtagaggacttggggtgtaggaaagctgggattgtccggagggacatggccgagttgggccagtgtccgaggcgggttcagcagcccctggggctggctctccctccatttgtgcctggggctgtcttccgtagccacctggctccccatttgtccaccttaccgtggtcttttctt

SEQ ID NO: 810 - DNA, 849 bp, Homo sapiens; identical to SEQ ID NO: 809

SEQ ID NO: 811 - DNA, 449 bp, Homo sapiens; identical to SEQ ID NO: 808

SEQ ID NO: 812 - DNA, 773 bp, Homo sapiens
gaattttcttggaggccgaggccctgcgcctctgtctgcacccaaggcgaccgcccagcttacccccggctcttctgagcacagggaggcctcccagcaaagcctgaaccctctaagtttagctgcaggcttcgaaccccgaccgtccccgccgagccttgggctgctgaggtggggatgaactgggcgaaagacacttgggagttaggaagaaacaaacaagcagggaagtgaccaggagacaaggtgagactttgcccggctcaggtctgaactgagtgttggagataaccacagttaacaaaataaacaaaattattcgcccccgtggagctgttagcaaccctggtgcctgggaagcctggaagaggctcgggttagtaacaacctccaggatgccctccgaactggtactggcgccgggactctagacaaggtccagattcccgggcccttccccttacgggtgcaaaaagggagggtcaggacctgccagtcctggcttcaggatgttgactggacggacctggactcatgggaactgtgcgccaaagtcctgggagcaaagtgtcataacgctcctcgtttgtctcttgccttcacaggagacagccctgctgcaagcggccagtgggaatccttggcctttgggggtatgatccaagaatgtaaacgctagcttttcagtgttttcgatttcgtgatattcaatgcatacaatacaatgtgactcttgaagcttaataataaaattatcattcttgagcccagca

SEQ ID NO: 813 - DNA, 773 bp, Homo sapiens
  misc_feature (12): n equals a,t,g, or c
gaattttcttgnaggccgaggccctgcgcctctgtctgcacccaaggcgaccgcccagcttacccccggctcttctgagcacagggaggcctcccagcaaagcctgaaccctctaagtttagctgcaggcttcgaaccccgaccgtccccgccgagccttgggctgctgaggtggggatgaactgggcgaaagacacttgggagttaggaagaaacaaacaagcagggaagtgaccaggagacaaggtgagactttgcccggctcaggtctgaactgagtgttggagataaccacagttaacaaaataaacaaaattattcgcccccgtggagctgttagcaaccctggtgcctgggaagcctggaagaggctcgggttagtaacaacctccaggatgccctccgaactggtactggcgccgggactctagacaaggtccagattcccgggcccttccccttacgggtgcaaaaagggagggtcaggacctgccagtcctggcttcaggatgttgactggacggacctggactcatgggaactgtgcgccaaagtcctgggagcaaagtgtcataacgctcctcgtttgtctcttgccttcacaggagacagccctgctgcaagcggccagtgggaatccttggcctttgggggtatgatccaagaatgtaaacgctagcttttcagtgttttcgatttcgtgatattcaatgcatacaatacaatgtgactcttgaagcttaataataaaattatcattcttgagcccagca

SEQ ID NO: 814 - DNA, 153 bp, Homo sapiens
aaaaattagccgggcgtggtggtgggcgcctgtagtcccagctactcgggaggctgaggcaggagaatggcgtgaacccgggaggcggaggttgcagtgacccgagatcgcgccactgcactccagcctaggcgacaaagcaagactccgtct

SEQ ID NO: 815 - DNA, 602 bp, Homo sapiens
ctcacgcctgtaatcccagcaccttgggaggccgagacgcgcggatcacgaggtcaggagattgagaccagcctggccaacatggtgaaaccccgtctctactaaaaatacaaaaaattagccagtcatggtggcaggcgcctgtagtgccagctactcgggaggctgaggcaggagaatggtgtgaacccaggaggtggagcttgcagtgagccgagatcgcgccactgcactccagcctgggggacagaacaagactctgtctcaaaaaaaaaaaaaaaaaaaaaaaaggccgggcgcagtggctcacgcctgtaatcccagcactttcggaggccgaggcgggcggaccacgaggtccggagatcgagaccatcctggctaacacggtgaaaccctgtctctactaaaaaaaaaaatacaaaaaattagccgggcgtggtggtgggcgcctgtagtcccagctactcgggaggctgaggcaggagaatggcgtgaacccgggaggcggaggttgcagtgacccgagatcgcgccactgcactccagcctaggcgacaaagcaagactccgtcttaaaaaataaaaaataaataaaataa

SEQ ID NO: 816 - DNA, 9453 bp, Homo sapiens
ggcagccctctctgctgccattttcacttcagccccaaggtgatgttcacaaaggtactgaaggcccagctgtgggtgtacctacggcctgtaccccgcccagccacagtctacctgcagatcttgcgactaaaacccctaactggggaagggaccgcagggggagggggcggaggccggcgtcacatccgtatccgctcactgaagattgagctgcactcacgctcaggccattggcagagcatcgacttcaagcaagtgctacacagctggttccgccagccacagagcaactggggcatcgagatcaacgcctttgatcccagtggcacagacctggctgtcacctccctggggccgggagccgaggggctggtgagcagggggcctgaggtggtggatatgtgtaacctggccctgaggagatagggttacattggaaaaggtagacaaggaatgtgaaggaggttggggaccagcattacttctctggggtcagcagctgattctagaggaggaggtgaggagtggggtggcaactattacttctcaaggatccaaatcagacaacagctgaaaactggatttgaaggtaaaggtgtcagttaatggaagagctgtgagaacaaaaaaactggctgttgaggcgttgggccaaggggctgacagggatcaggttgccagaagagtaagaattagagatggtgagttgaaggagagctagctagctggcaagaaaagtgggcaaaagataaattctgggggtgggagcaatggaaaagctgagaagtcagcagtctctattctgatgcccctggcaggtgggaaaggaacagggaagaggaactgttcaggaccatatcacatttctttcccctctccctgaccctcagcatccattcatggagcttcgagtcctagagaacacaaaacgttcccggcggaacctgggtctggactgcgacgagcactcaagcgagtcccgctgctgccgatatcccctcacagtggactttgaggctttcggctgggactggatcatcgcacctaagcgctacaaggccaactactgctccggccagtgcgagtacatgttcatgcaaaaatatccgcatacccatttggtgcagcaggccaatccaagaggctctgctgggccctgttgtacccccaccaagatgtccccaatcaacatgctctacttcaatgacaagcagcagattatctacggcaagatccctggcatggtggtggatcgctgtggctgctcttaaggtgggggatagaggatgcctcccccacagaccctaccccaagacccctagccctgcccccatccccccaagccctagagctccctccactcttcccgcgaacatcacaccgttccccgaccaagccgtgtgcaatacaacagagggaggcaggtgggaattgagggtgaggggtttgggggaaaggggaagcaggggcatagtcagggtggggagtgtttgaagtttgcagatgagaaggtttgacaaaaagacagagagatgtagagacagtgatagagacagaggaacaaaaagagcagcagtgagaaggcaaagagagaggcagaagagacagacgaggcagagacaaaacactgagaaagagactgaaatggagtaataaatgaaagccccacaccaagcctcctttcttccactggcaaggtgaggggcttggtatagtttggggagatcccctgactattcagtaggagaagaaatcaaaaatccattcttttctccttctctccctccaacagtggccaggggaaggggaagtgagggcaggggcaaaaagatttgggaatttttatttatttatttattgtgacttttcatttttttggtatttggctttactggaataggagggcccctgcccactgtgccccgtttatcccttattccccaaaccctgctctccccaacacctactcacttaagcacttgtataaagcctccagggttgggaatgggagtaaagggcaagagggcggacacatgaagtttagtttctaacccatcatcaccctaactcaaccttttctgagccaaatggcttgaattgaagccagttgtcatggaaatagtaagaggttagggtttaagagctggggatgcgggggtgggagagagaaccctcaacatccaggatctatataatgagagctactttaaaccctcaggtccaccctcatgatgctgagttatttagccagagggtgcagcctgcttatgcccaaattccctcagccaagagagagaccaaagagcctctggaatggccctgctcccagcctctatcttcaggtcaattagagagagtatagagaccccagagtcccctgggtctggaaagcgttaggagaggtcaagaaaggagcagtaaggaggctgaaggttacagggcatttgaatccaaatcactgctctgggctagggaatagagccagcagaccaaggtgggaaggattctggaagggggacattttagtctcctaaccccaaagctcagggtggaagaggggagaacaaggaagcagagtgtataattattttttccttttatttttggaatctaacagtacctggcagcagggaggggaaagtacagtggggaaaagcatctgacaaggccagttagaacagaggatgggaaggatggagactcccgggcttggaaggctaggaagcaggcagagactggttgccatttcaagtcactagctaggcccattcattcctcccacaaccctgacccattctcctctggactcactgtgcctcagtttcttcccctcaatggaatgagaaatgacagcacccgccacagccaagagatgaattctgagcacttaccacgggcactttatggacataaaatacctctcgctgtgggacagataaccagggcaccagagtagtggtgaagagatgtgaggcttaagaggagtcacaggcttcagagtacaagttcccctctgcctcccagctggacagtgcctagaagccaaggagttgagaatctcctgatccacaccctatccttacttcaccaccaggcctcttggctccaggcaagagcttagaggatgtcaggagaggtgggggtaagaatcttcagcaaaactgtcactctaagtagagccagcagttacgggtctgataaaaacagtactgaactaaagtaaagcccaagctggtgagcaaaactggatggctcattcttcccaagagcatgactctcccccttggccagttggtggaaggggcaaaggtatgtgaccacccttgagaaggtgatgttggtgagctttaacatcttattcctattcttatagtgagaaagtgaaacaagatctttcagtagaggaatgggcagggctgttaggctcttcagcttgccttcacccatatagcagctatgctaaccccaagcctctctggccctgttcttcatccttccttctgccccaatcctgaaggacaagacacacccggccatcaacaccactcacatttccttggtggaaggaaaggaacagagaagtgaagaacagatacctccctccaaggtcaaatgcctcgtgatcttggcagagtagggattgggcaataagcatcaggtatcttccctctacagattctagagagctggggcattaaatatgggggacacttagaatacagctccttaaataccaccaaataaagacctttgtgtgtgtgtggtgggtggggggggggcaggggtctttctcttatgaacataaatctgtgagctgaagtctcattcccctgttcctccctacccccaaagaggcacagagtgaagggacttggggggcacagctcagcaacccagtgggagttagcaccccctcccaccttatgatgtgtgtggacctggccagtgcccctctgaacatatcattattagtgtaattatcatttattttgtgtatttgtcacattgtgtgcatgacagcctttgttaagggtgtctgaggagtatggagctgacaggggcattggaatgccaggaaagaacttcttcaactgagatcaaggcttcctggagggaaccactgcaaaaaggccatcaggcagttttcaagttatgtgacagagggcaaagacggccatagggtgctctgagttttgggatggtcacatgacacaatccagcacttgaacctgaaaaaaaaaataaaagcggtcaaagagtttagaattcagtgctgagctcttctccctaatcaagtgccacatttacaccttggagaaccggaggtgaagaggatctgagacaggaaacctcgtgttcaatgactaagaagatggggtcctggagcaagacagaaaacactaagggcatggtggtataaggtttgggacatgcaggccaaggaaggatggaaagaggacaggaaactgggggtacctagaacaacccctctctgaaaagcttgagccaaaacagtcccaaagacaacaagacccctctcccagcctccacagaatggaagatctaaaggttctcttgagatgatccagctagtatggaagatctaaaggttctcttgagatgatccagctagtgtcctattctcctgcagtccctgttcctaggtttcctcaacgaagtttgacaaaaatctaaaccaacatagccaacgaacttgccttgttacacaagagtggctaaaatagcatctcaaatattctttcagttcactgtaaaaatttttcccatgtacctagagcacaattccccaggaatatgagttgggaatggcaaaagaatattgcctgactcacatttttcaaaaataaggaaagctggctgggcgcagtggcttacatctgtaatcccagcactttggggggccgaggcgggcggatcatgcaaggtccggagttcgagaccatgctggccaacattgtgaaacctcatctctactaaaatacccaaaattagccgggcgtggtggcgtgcgcctgtaatcccagctacatggaaggctgaggcagaagaatcgcttgaacccaggtggcggaggttgcagtgagctgagatcgcaccactgcactctagcatggtgacagagtgagactcccatctccaaaaaaaaaaaaaaaaaaaaaaaaaggaaagcaggacccagtggtgtgctcctgtagttccagctattcaggaggctgtggcaggaggaccacttgaggccagagggtcaaggctgcagtgtgctataattgggcctgtaaatagccactgtactccaagctgagcaacacagtaagacactgtctctaaaaataattaaagtaaaataaaaataaggaaagctcctgtgacatcaacctgatccagaattggggacagcgctactgcgggttcaatgtactgccatgttttccctgtcttatcagttctatcagcacactgaccccactcgagaccaactacaagactaaggctggaagtggttgagtagcagaagtgttatgtattctatcttcccaagggaaccatatccacatctacccctaactttggcctgagctgaaaatgggttttctctccctgtggctcatttgtttcctatattgagagaacacccaaaaaaagactactcaagatgactttttacaagtcttttctttatcctaaaacatcctccaaccgaaggcatgggaagctatcctatactctgaccttgcctatattttaaatggcaggggccccaagctaagaatcagcaggcagtggcatctacagcttctggtctgtagtggcgtagaagcaggaaaatcaatgctccaaagcaacaatgtccagctttcctgccagtgagctgggcttgagggagtgaatgggactctttctgccttttctttttctcaaaatacgactgcattaactgggtgtatgcacacacaaacatgttcaaactagggcactcatacctagctagaacctactcagggaaagaaatatgtatttccacagtaccctgatcacccagtaaaagctaatatttattgaataattactatgcaaattatggtaagcaaattgtagtgtgaatacatgatatgagaatatcacttaattcacacagcaaccttcacaatggggttccttttggtacagtctgaaaagagaatgattatctgcgcagggtctcagagctagtgtggtagaataagaaattaaacctaagtagttgctaaacaatattacattctaatctatcctattgaaagtgatccgggaggtagaaacctaaatacaggaataacataagggaaagagataacaagaaagttagggacaccttggactcaaagaatctggaaagatgtgaaacctgtaattttaaatccctttggaagggaaaaacaagaaaagtctagatatggcaagagaaggggaggttaaattttggggggattccaataatcagaaataagtggcattgccagaggccctcatataagagaacagcaaaaaagttatcctcccttaagttcctccctcactcctcatatcagacacagcaagagaactcagctcaacaccaagaagtcctgcccttattcacaccttccttcctatagccctcatcctcacagaagcttctagcctctatcttcagcagttcttaagaggtggggtggggggctgggcagtttagagtgagagtggaaaaaaagaataatcctagagaaccataaaaaagtacagatttacagctgaggaagctagttctccccacagcttttatagactccctcattaagagcttccaggtatgcagagaatgtcacagcttcaggaattggaatcagttaaccacatctggatgctggatcaactatagtagggaaacggggagaggaaggaagggtactaagatctcaggtaaacaattacaagcctcaatgtctgttccatctccaaacggaattactattttaaaactgaattgggaaaaaggcatcctgaactattcatgctcaaagagtatgtggagaatgactataatgagataggaaggggaggacttcatctggcttggaggttagagacttctgaccaacataggaacagctgctgaaatgggatgaaagaggttaataagaaaaaaaaaaaaatcctcacaaattggaaaacactgttcaaagatctaggggaagtaagatgagtgaggagaataattaggcttcaagaagagaatcctggcaagtaaggctgaatatctttctggaaggttatagaggataaagagacgaagaaaacttccaaaagatccactgttccacttcataatcagcatctgctctattccctcatgtatttttctctttttaaaaccatattcaggaagaaaccattagtgaatctataatctctcaagttacaaatcagatctattctgttttcagatgaaggcagagtagagagaggaaaagctagccccaagatcagagcctgaggtaaagaaaaggaaggcagacagaaaagagggaaaagggaaggtcattccaattttaaggtttatttggttgaagaggtgtcaaaaatttaaccagcattcccttttgttcacttctccaaagtctcagaatggggcaaacttcacaacaaatgggcagcagtttttggatctgctctccaaggcacaatttttctaaattatctaaactttaggtccctgctttcctcaccaaccagagactttggagaaataaagagatatcttgacattagaaaggtgatcaaactattaccatttcattaagcacaaaaccaggcaggttttagtagaaataaggataaaggattacaccacagcaacatgggacctgatcatagtaccaaagtcttcaggtaaggtgtcaggctcctaagtcttattaccaaaaatagctcaaacaaaaaccgagcttatataaagattaagaggagaaattctgcaataacatatccaaaaagattaagcaggtttcagatctacatgaacttgaagcctccagttccactgcttatgttcccaatgatttagctaacaatgcgtaacagctctgacatcctctgtcatgctttgattctgcatacaaaatttcttctgtctctgagggatatccagcccatctcccttcctgaactgactgaccaacatagtatcgtatcacatcacccttgaaatcagggcccttttcctttaatgtgggaccctggactccattttatccaagaaaaagtctgcattattagctaataacagaaggctactaatcactgcccttgtatttatatcctttgcaacacctaaaacctcccatgttctgttttatttcagtgggtcactacaagctgctggagcaaagacttggtgggtgggtaacttaacctcttcacagaggataaaaaatgcttgtgagtatgacagaagggaataaacaggcttaaagggtaaactcagtccttttccttgtcttctcttctaagggataaaggtattatggccaattctctataatatttgcccctgaagctccccttatctggtctaatctagctccaataaatcaaaggagcacctaataaaacacattgttctcttttctatttttttttattaacaagcaacataatcaaaaacaaaaacacaacaaccttaaagctgaaacagcaataagtcaaactgctgccgcagttcatggatgtacctggggtacatgctccctcattgcgaggcaggacgtaggcacatgactgtgcatttaggcatatatgtgaccaagaagaaggagagaaatggaaaacactggagaacagaaagtatcaggaacttttcatcaggcaatcccaaagcgctctgctcttttcctcttctttgcctgtaaagaagaagcaagaagaaaaaaattagactgaagacaatagttgcctgggttcctggctgctttaatccaaactcacatgaactgtcacaaggcccgagaaggaaggatggcccagacttgagcttggtagctagagatttcattcctgaatctctccaatccttccagttatccagtaggagctggaaagtttaatgggtaaggagggtgaggagtaaagaagattactgggggtgagggacagagagaagaacagtggtagaaaatgggaagattcctgaagcaaagagagccactcagcctgagatcaagctagcctggaaacaatgggctcttaacaggctgggaaaagtcttccagtcaatggggagacggaagatttcagaggataaaggattaaccaatgctattcatagaggtgaaggagatgcccttctgagcagtcaggcccagacagtagctattccttaggactccaacccacaaaaaaggcatataaatc

SEQ ID NO: 817 - DNA, 5469 bp, Homo sapiens
attttgtgtatttgtcacattgtgtgcatgacagcctttgttaagggtgtctgaggagtatggagctgacaggggcattggaatgccaggaaagaacttcttcaactgagatcaaggcttcctggagggaaccactgcaaaaaggccatcaggcagttttcaagttatgtgacagagggcaaagacggccatagggtgctctgagttttgggatggtcacatgacacaatccagcacttgaacctgaaaaaaaaaataaaagcggtcaaagagtttagaattcagtgctgagctcttctccctaatcaagtgccacatttacaccttggagaaccggaggtgaagaggatctgagacaggaaacctcgtgttcaatgactaagaagatggggtcctggagcaagacagaaaacactaagggcatggtggtataaggtttgggacatgcaggccaaggaaggatggaaagaggacaggaaactgggggtacctagaacaacccctctctgaaaagcttgagccaaaacagtcccaaagacaacaagacccctctcccagcctccacagaatggaagatctaaaggttctcttgagatgatccagctagtatggaagatctaaaggttctcttgagatgatccagctagtgtcctattctcctgcagtccctgttcctaggtttcctcaacgaagtttgacaaaaatctaaaccaacatagccaacgaacttgccttgttacacaagagtggctaaaatagcatctcaaatattctttcagttcactgtaaaaatttttcccatgtacctagagcacaattccccaggaatatgagttgggaatggcaaaagaatattgcctgactcacatttttcaaaaataaggaaagctggctgggcgcagtggcttacatctgtaatcccagcactttggggggccgaggtgggcggatcatgcaaggtccggagttcgagaccatgctggccaacattgtgaaacctcatctctactaaaatacccaaaattagccgggcgtggtggcgtgcgcctgtaatcccagctacatggaaggctgaggcagaagaatcgcttgaacccaggtggcggaggttgcagtgagctgagatcgcaccactgcactctagcatggtgacagagtgagactcccatctccaaaaaaaaaaaaaaaaaaaaaaaaaaggaaagcaggacccagtggtgtgctcctgtagttccagctattcaggaggctgtggcaggaggaccacttgaggccagagggtcaaggctgcagtgtgctataattgggcctgtaaatagccactgtactccaagctgagcaacacagtaagacactgtctctaaaaataattaaagtaaaataaaaataaggaaagctcctgtgacatcaacctgatccagaattggggacagcgctactgcgggttcaatgtactgccatgttttccctgtcttatcagttctatcagcacactgaccccactcgagaccaactacaagactaaggctggaagtggttgagtagcagaagtgttatgtattctatcttcccaagggaaccatatccacatctacccctaactttggcctgagctgaaaatgggttttctctccctgtggctcatttgtttcctatattgagagaacacccaaaaaaagactactcaagatgactttttacaagtcttttctttatcctaaaacatcctccaaccgaaggcatgggaagctatcctatactctgaccttgcctatattttaaatggcaggggccccaagctaagaatcagcaggcagtggcatctacagcttctggtctgtagtggcgtagaagcaggaaaatcaatgctccaaagcaacaatgtccagctttcctgccagtgagctggggttgagggagtgaatgggactctttctgccttttctttttctcaaaatacgactgcattaactgggtgtatgcacacacaaacatgttcaaactagggcactcatacctagctagaacctactcagggaaagaaatatgtatttccacagtaccctgatcacccagtaaaagctaatatttattgaataattactatgcaaattatggtaagcaaattgtagtgtgaatacatgatatgagaatatcacttaattcacacagcaaccttcacaatggggttccttttggtacagtctgaaaagagaatgattatctgcgcagggtctcagagctagtgtggtagaataagaaattaaacctaagtagttgctaaacaatattacattctaatctatcctattgaaagtgatccgggaggtagaaacctaaatacaggaataacataagggaaagagataacaagaaagttagggacaccttggactcaaagaatctggaaagatgtgaaacctgtaattttaaatccctttggaagggaaaaacaagaaaagtctagatatggcaagagaaggggaggttaaattttggggggattccaataatcagaaataagtggcattgccagaggccctcatataagagaacagcaaaaaagttatcctcccttaagttcctccctcactcctcatatcagacacagcaagagaactcagctcaacaccaagaagtcctgcccttattcacaccttccttcctatagccctcatcctcacagaagcttctagcctctatcttcagcagttcttaagaggtggggtggggggctgggcagtttagagtgagagtggaaaaaaagaataatcctagagaaccataaaaaagtacagatttacagctgaggaagctagttctccccacagcttttatagactccctcattaagagcttccaggtatgcagagaatgtcacagcttcaggaattggaatcagttaaccacatctggatgctggatcaactatagtagggaaacggggagaggaaggaagggtactaagatctcaggtaaacaattacaagcctcaatgtctgttccatctccaaacggaattactattttaaaactgaattgggaaaaaggcatcctgaactattcatgctcaaagagtatgtggagaatgactataatgagataggaaggggaggacttcatctggcttggaggttagagacttctgaccaacataggaacagctgctgaaatgggatgaaagaggttaataagaaaaaaaaaaaatcctcacaaattggaaaacactgttcaaagatctaggggaagtaagatgagtgaggagaataattaggcttcaagaagagaatcctggcaagtaaggctgaatatctttctggaaggttatagaggataaagagacaaagtgaagaaaacttccaaaagatccactgttccacttcataatcagcatctgctctattccctcatgtatttttctctttttaaaaccatattcaggaagaaaccattagtgaatctataatctctcaagttacaaatcagatctattctgttttcagatgaaggcagagtagagagaggaaaagctagccccaagatcagagcctgaggtaaagaaaaggaaggcagacagaaaagagggaaaagggaaggtcattccaattttaaggtttatttggttgaagaggtgtcaaaaatttaaccagcattcccttttgttcacttctccaaagtctcagaatggggcaaacttcacaacaaatgggcagcagtttttggatctgctctccaaggcacaatttttctaaattatctaaactttaggtccctgctttcctcaccaaccagagactttggagaaataaagagatatcttgacattagaaaggtgatcaaactattaccatttcattaagcacaaaaccaggcaggttttagtagaaataaggataaaggattacaccacagcaacatgggacctgatcatagtaccaaagtcttcaggtaaggtgtcaggctcctaagtcttattaccaaaaatagctcaaacaaaaaccgagcttatataaagattaagaggagaaattctgcaataacatatccaaaaagattaagcaggtttcagatctacatgaacttgaagcctccagttccactgcttatgttcccaatgatttagctaacaatgcgtaacagctctgacatcctctgtcatgctttgattctgcatacaaaatttcttctgtctctgagggatatccagcccatctcccttcctgaactgactgaccaacatagtatcgtatcacatcacccttgaaatcagggcccttttcctttaatgtgggaccctggactccattttatccaagaaaaagtctgcattattagctaataacagaaggctactaatcactgcccttgtattcatatcctttgcaacacctaaaacctcccatgttctgttttatttcagtgggtcactacaagctgctggagcaaagacttggtgggtgggtaacttaacctcttcacagaggataaaaaatgcttgtgagtatgacagaagggaataaacaggcttaaagggtaaactcagtccttttccttgtcttctcttctaagggataaaggtattatggccaattctctataatatttgcccctgaagctccccttatctggtctaatctagctccaataaatcaaaggagcacctaataaaacacattgttctcttttctatttttttttattaacaagcaacataatcaaaaacaaaaacacaacaaccttaaagctgaaacagcaataagtcaaactgctgccgcagttcatggatgtacctggggtacatgctccctcattgcgaggcaggacgtaggcacatgactgtgcatttaggcatatatgtgaccaagaagaaggagagaaatggaaaacactggagaacagaaagtatcaggaacttttcatcaggcaatcccaaagcgctctgctcttttcctcttctttgcctgtaaagaagaagcaagaagaaaaaaattagactgaagacaatagttgcctgggttcctggctgctttaatccaaactcacatgaactgtcacaaggcccgagaaggaaggatggcccagacttgagcttggtagctagagatttcattcctgaatctctccaatccttccagttatccagtaggagctggaaagtttaatgggtaaggagggtgaggagtaaagaagattactgggggtgagggacagagagaagaacagtggtagaaaatgggaagattcctgaagcaaagagagccactcagcctgagatcaagctagcctggaaacaatgggctcttaacaggctgggaaaagtcttccagtcaatggggagacggaagatttcagaggataaaggattaaccaatgctattcatagaggtgaaggagatgcccttctgagcagtcaggcccagacagtagctattccttaggactccaacccacaaaaaaggcatataaatc

SEQ ID NO: 818 - DNA, 646 bp, Homo sapiens
agctgacaggacaccctaagtccatcctgattttgcagaactcaagacatggggaggatacttaaaggcctagacttcctaaccctgcttatatggctctggaagctcattcctgattcttcctatctagagtcaggatagacatattctgtccaatggagacatgttgtaggacactcccaactgacttaggaaaggcagtgaagaggagctggaatggaggcagaggcagatatttattgagaatcatctattagacccaagaaggatcaatttaaggtccagagcaaggggaaatgggtcaaaatgtaaagttgggatgttcaaactttgtaaagacctactggcactagactgagaagtcaaaggaagctcaggggagaaaaaaggcattgtagttaatctggtgtatttaatattatttctggtgctttaggcaaataggaggcaacaccatggaggtaattattcctttcctcaagagctgggggcagtcatggtgatgatgatggagcagcagctgaagaaacttcttaagagagaatggggagacagatgtataggaagtgcttggatagttccattttgctgggtgttattcctaatgggagtgaggcaagaagcctagatctgaattctggtttac

SEQ ID NO: 819 - DNA, 428 bp, Homo sapiens
tctactaaaaacacaaaaattagccgggtgtggtggcacacgcctgtaatcccaggtactcaggaggctgaagcacaataatcacttgaacccgggaggcggaggttgcagtgagctgagatcgcaccactgcactccagcctggacgacagagcgagactccatctcaaaaaaaaaaagaagcttttcataaagcatcatcctgttggtactgtcctcaagatagtaagttcttgccagatatggctgtttaaggccttccaccatgattgtaagcttcctgagcctccccagaagccaagcagatgccagcaccatgcttcccataaagcctgcagaaatgtaagccaattaagcctcttttcttcataagttacctagtctcatgtatttctcctttacagcaatgcaagaacagcctaatatac

SEQ ID NO: 820 - DNA, 245 bp, Homo sapiens
taagtctcccggccaagtaggaaacagttttcaggaaaataaatggagcctctcttcttgcggagaggcaagactagaccactatcttgttaaactaccattataaacttttttccattcaatttagcactagcagtacttcagcaagttcaaatcacagaggagataagacttttgaaacccagacattatataagcacaaaccctgaggccaagccctcccccaacgtatgtccacttggaat

SEQ ID NO: 821 - DNA, 481 bp, Homo sapiens
caacccccacacctccacaaacacacaaaaaccttgaaaatctggacaaaataatgaaacaatgggttttagactttggacaacagcagtgcaggactgtgatccctaaaagaagggaaacaaacaaagtgagctttacaggcacccacccaccctggctttttgcctggggcacattctaaattgtagatctgggacagggaatcttgagcaaagaacaagatgaagagatagagatcagaatttatggaagctgaggcagcaagaagttgtagggcaaagttcagcaggaaggacactttgtcaaaattaatgctatccatagaagtctctgactttttgctgaattctagaatgaacatacatggagtaaaactgtaaagccagacaaagagcaaccagattgatgtgaactgacagacatcagaggtcacagagggctgggaagcatttgaggttttactagctagaggggaaagtc

SEQ ID NO: 822 - DNA, 579 bp, Homo sapiens
cacctcagccttccaaagtgttgggattaaaggcatgagccaccactctggcaacttttcagaattttcaagtgaccatgatggagtttaccatctgtcaacccccacacctccacaaacacacaaaaaccttgaaaatctggacaaaataatgaaacaatgggttttagactttggacaacagcagtgcaggactgtgatccctaaaagaagggaaacaaacaaagtgagctttacaggcacccacccaccctggctttttgcctggggcacattctaaattgtagatctgggacagggaatcttgagcaaagaacaagatgaagagatagagatcagaatttatggaagctgaggcagcaagaagttgtagggcaaagttcagcaggaaggacactttgtcaaaattaatgctatccatagaagtctctgactttttgctgaattctagaatgaacatacatggagtaaaactgtaaagccagacaaagagcaaccagattgatgtgaactgacagacatcagaggtcacagagggctgggaagcatttgaggttttactagctagaggggaaagtc

SEQ ID NO: 823 - DNA, 579 bp, Homo sapiens; identical to SEQ ID NO: 822

SEQ ID NO: 824 - DNA, 125 bp, Homo sapiens
cctgtaatcccagcactttgggaggccgaggcaggcagatcacgacgtcaggagatcaagacaatcctggctaacatggtgaaaccctgtctctactaaaaatacaaaaattaactgggtgtggt

SEQ ID NO: 825 - DNA, 125 bp, Homo sapiens; identical to SEQ ID NO: 824

SEQ ID NO: 826 - DNA, 453 bp, Homo sapiens
tattaacatttttgatctttacaataaaatcccttcttcagtccaaaagagcccaagcgttaagctgagtataaatgtttagacttaccaagcagatacataaggaaatactttttaacattttttcttccaggccaggtgtggtagctcacacctgtaatcccagggaaggccgaagtgtggggatccctgtgcccagcctgggcaacatgacaaagccctatctctacaaaaatgtacaaaaattagccaggcatcatggcctgcacctgtggtcccagctactagagaggctgaggtgggaggatagtttgagaccgggaggtctaggcttcagtgagtcgtgatcgcgccactgcactccagcctgtgtgacaaagtgaaaccccatcacaaaaaagttttctttcttgaaatgtaaaagaaaaatgccacggagtggtttaacagatt

SEQ ID NO: 827 - DNA, 451 bp, Homo sapiens
tattaacatttttatctttacaataaaatcccttcttcagtccaaaagagcccaacgttaagctgagtataaatgtttagacttaccaagcagatacataaggaaatactttttaacattttttcttccaggccaggtgtggtagctcacacctgtaatcccagggaaggccgaagtgtggggatccctgtgcccagcctgggcaacatgacaaagccctatctctacaaaaatgtacaaaaattagccaggcatcatggcctgcacctgtggtcccagctactagagaggctgaggtgggaggatagtttgagaccgggaggtctaggcttcagtgagtcgtgatcgcgccactgcactccagcctgtgtgacaaagtgaaaccccatcacaaaaaagttttctttcttgaaatgtaaaagaaaaatgccacggagtggtttaacagatt

SEQ ID NO: 828 - DNA, 494 bp, Homo sapiens
tgtgatccagcaattctaccctagagaaacctgtatgtgttataccaggatgtatgtacaagaatgtgcatagcagcattgtttgtagtagtcaaaaattggaaacatccagatgtctgtcaactgtagaatggataaattgtgttatgttcatatactataatatcatacagcaaagaaaatgattgaaccacagttacattcagtatcagagatggatctggcataatctggaatgattcaaaaaaagcactaaagaatataaacagtataattccatttatgtaaagttcaaaaacaggcaaaatgatattgaataagaatatagctcactattcttaaaatgcaagaaaatgattttcacaaagtcaagataatagatactttaaaagggagggatggagttgtgattggagaagggcacatgagtaggcttttaggactctggcaatgttatttcttgatctggggaaaaagataaagtaaaaagaaaa

SEQ ID NO: 829 - DNA, 912 bp, Homo sapiens
aagtgaatgtaatgtcagtagactcttgaaaatgtcccttaccctctggatctgttaaaaatgttattttatattcaaagttcaggttgttttttggtttcatcctctcttgcttttttaaagttgtatatgtgattatgtcattactggaagagtcttattcctttcccttaatctctcactcttgccccctgcccctgtgtaggactgaatacttcattctgttgtagagggtctttgtacacagtacattattacattatttaatttcttcactccccacctgtgaccttcctttctctgatgtctccttactaattccttcactttcacttttcctttcagctgtcatccactctttcctttttacttatctgctgaattaacttgctcacactgattaaccctcttttgtttgttattagtgctgcttagagtctttcttctattttctccatccagctttccttttactctctcattctgactttgcatccccagtcatgctcctagcctttaaagagttatccttagctacaagaaaaactggtaaataaaaatataaaatgaaacaaaacaaaaacttcacattcttctcacccgtctgcttgtgtatctgagcttaagttttctctattttcatttaatttcacccttaggacacaggccatttatttagtaaacatttgtttaatgtctgttatgtaccaggctctgtgctagagaaaacaaagtctgctctgcatgtgcttacagtctcttggggcattgtgcatcaggggtgcagggagcgacagacatgaataaattatcatagcgttgagattaaagctctgttgaaccacacaggagagcagttactgctgtccaaggagattaggaaaggcgaaggcatttttgtgaacttcatgt

SEQ ID NO: 830 - DNA, 11051 bp, Homo sapiens
ctcggcgatgagctaagacgctgtttcagagcgtttgggtcctctgaggccccttgaccaggtgagcggaccctggagctgggccccgggctggggcggaactgcggcctaggggcctagggagcagctgcttcccggcgggtgcagagaatcttccctcgaccgagggggcggggtccgtagcggaggtgtcggccctggggcctatgagagtgatgaagctgtggatctggtaaacagagtacaaccttctgctgcatatttttcatccattcagcgcaattttaagtagatattaaaggtaggcgccaccgagaaggtaatatttgagcagaaatctgaaggaggtgggtggaaagacctaagtggcttttgcggtcaggaactttctaggtagagggaatagcaagtgcaaaggtcttaaagcaggagcttgcttggcatatttgaggaataacggggagaccagagcggttggagcagtgaacaaaggcgacctttgtagggaatgatgtcagagagattggggtatggagaggaagagtgtagaggaaatgagaactgtatcgtgtaaggaattttgtctttttttggtgtgtgtttttggaggattttgagcagaagaaaacatgatctgacttatgttttaaagcttctttacttggagactcatgatgataatagattgtaagtgggcaagaatggaatcaagaaaacttaaaagttaagagtaattttttaaaattccaagtaattcaggtgggagataaggatatcttgagccagtgatcagattatgatctgctttgaaaatagagacaataatatttgctactgggtcagatgtagggtgtgacagtaagaaggcaaatataaatccaaggttttgggcctgtgggtgcaagagatactggagaaaagatctgaggtttagctttggtacctcgtgtaagttcttcaactctccccgtctcaatttccttctctgcacgaagaaattaggaatagtgtcttctttatagggttgtgtgagggttaaataattaatatatgtgaaacatgtagtatagttgtcctggctcattgttttattatgctgagacatgaagtgtgagtgggcattaacaagaagaaaattggagggttggagggtggtccaagcagaaggaataagctgtggaagggccaaggagcaagaaggagtattgcaaatttgatgaaataaagtactttattagatcaaaaaacaatgtaaaccatattaaatgttttgaacttgatcctaagggtaataatcagccattatatgtaacaggcatagcagggacataataatatttcatatcctccttagaatgatcactgtttgcgtgtggaaaatagattggtgtctcagaccagtctgtttgtcacagtggtctaggtaggagaagacaatggcaaaggggatgagaagtggattgatttgagagatatttaagcaatagaatcaatagaacttgattgatcagatacatgagatatgaaaggaggaaggaatggtcagttttctggctcaaatagctgggtagatggagctcctcccaaaacagtttatcaaattatttattatatattgtgtttgatatatttaatcacattatagaaatgaactcaccactaattcagcctcatacccagccaggcacggtggctcatgcctgtaatcccagcacttcgggaggctgaggacggtggatcacttgaggtcaggaattcgagaccagcttggccaacatggtgaaacactgtctctgctaaaattacaaaaattagctgggtgtcatggcaggcatttgtaatcccagctattcgggaggctgagggaggagaatcacttgaacccgggaggcggaggttgcagtaagccaagattgcgctgctgtactccagcctgggcaacagaggcagactccatttcaaagaaaaaaaaaaaacacatcataccctatatatacatatcaacatcataccacatgtttatttatataccaatactgatatagataccagtatatatatatgtatgtggcatagatatatactgatatgggtatagatatctctatagatataataatatgaatacaggtatatataaaaaatacgaatacaggtatatatacctaaacaataatacgaattatgtatatatatacatatgcctgtatttgtgtcattatttgtataactagggtatctatatcggtaaagataggtagagatctagaaagagatttactatagggaattagcataggtcattatggaggctggcaagtctcagtatcttcagagtgagttttcaggctggagacccaggagagcaaatggtttagttccagctcaagcccaaaggcctgagaaccaggagagctgatggtgtagttcctgtctgaaggccataggcttgagattcagtaagagctgttttagttccaagtctgatggcaagaaaaaagctgatgattcagtttgaagcattttagacaggaagaattctcttactcagggatgagtcagcctttttgttctagtcagacttttaactgcttggatgaggcccaccaacattatggagggcagtctgttttagtcaacagtctaccaatttaaatgttaatctcattccaaaaacaccctcacagaaacatccagaataatgtttgaccaaatatctgagcaccctgtggccagttaagttgacacataaaattaaccattacaataccaatcttttattttctggctaataatcatcactttttttgagacagagtctcactctgtcgcccaggctggagtgcagtggtgtgatctcagctcactgcaacctccacctcctgggttcaagtgattctcctgccttagcctcccgagtagctaggactacaggcgtgtgccaccacacccggctcattttttgtatttttagtagacacggggtttcactgataatcatcactttcttggacttttttacttatattaagaatactaggaattggctttttaaagtttaagttcattttgactaagaaaaataattatcagctgggaaatgttaactatatacacattcaggaatatataacagcaaactgtttggaggctaagccactgattaagtgagccttctcccgttctcccacttaccgcatgcacattgattcaaaggcatgtgtcagcagctgacagatggtgtttcactgatctatagggatactcaagcatagtcaaaatcaagaatgctaaatccccacataccaagggcctgccccaaaggatggtagggaattgtctgagttcatttttgacatgttggatttgagaggcttctgtagggtatcctggtcccaaataggcagaaggaaattcaggtctgacacttgagatatctgacctgaagaataaggaaatcatcagcataaggacagtaattgaagtcacaaaaatacttatactctacattagccctttctagtttctgccctatctttcttgttccattcaatgtattacttttttgaaatttgtcatttatgctcactctccattttctcatttcctatggcaggctagctattctcactaccaaaattaccttcacagaggtcactaatgacatctttgtttttgaatcaagtgtctatgccaggtcttagattaattcaccatcttatagcatttcacactcttgaacactgtgctcatatcatttcccttataaatcagtgaattccttctgttctttagaattatctcatttacctcaaaacttctgtgaattaggtattatcttcattttacaaatgagtaaactaagtccaaaaggataagttacttgccccaggtcacaacatgtaagtgacagggctggattggaacccaggcctgtctaaggcccagggtctttccaccattccacatttacagaaatagacctccttgaccttctggatactattgtcttttttctcctcctacctttccagttccatctcacttctgtttcttacatgtagatgtttcccaggattccggctccatataacgttttcccagccataactaactactacactgaacatccaacagctttatggtgtcttttttgtctgaaaaaactttctctatttccttgtctttcacttgtcttttttcttttctttttctttctttctttcattctttttctctcttttcttccttttttgatataggtcttgctctggttgcccaggctgaactcagactcctgggctcaagcagttctccctcctcagcctcccgagtagcttggattacaggcatgtgccaccatgcctggtgtcactatgttgcccaggctggactcaaactcctgggcttaagcagtcttcccacctcagcctcccaaagtgctgagatgacaagtgtaagccacagtgcctagcctcagttattttgagggctacaaaatggtgatttttcaaatctattattccttctacattagatggtattctgtaagatagttttttccttctgtatgtatgtttagaaatggttgttttagagagaaaaaatggataataggaaatgtataaacccaagaaaatgttactgttcttgttagcagtactattactgtttctgtcactcttgttactataattttaggagtgtctctgaagatacagtccaaagaaagttctccaaaacaaggagaacagtctgaagctggggatggcaacagcattggtgagtgcccattccctggctcccctgaatctgaagaaggaggggcttcgggtagtgagggaggatcactactctacttgggaacagggattcaagctgcaaggaaacagtaaaggccttggacaggagccattgtgcaaacaattcaggcagttgcgttatgaagagaccacaggacctcgagaagcactaagtcggctccgggagctctgtcaacagtgctacagcccgagacccataccaaggagcagatcctggagctgctggtgctggagcagtttctgatcatcctgcctaaggagctccaggcccgggtgcaggagcatcacccagagagcagggaggacgtggttgttgttctggaggatttgcagctggatcttggagaaacaggacaacaggtggtaagggtcagatgtgctctttttcaggaatgcaggaattgagatctctggccagacaggtggacatgggctcatcagcggaaggagaattactaagctttgattcagtttttttccagtctagctgttaatttccttaggtcttacctcaaccttacctggcccttgcttggagaaaactgaatgtgcaccagattccccatcttcttttctttgcccctctggggtttctctttcttctcttttttaacacctaggtgttttactgaacagcagtttcctaaacccacatatatctaattatgcctccatatacctaattgtccctaggacccagaccagccaaagaaacaaaaaatacttgtggaggagatggcccctctgaaaggagtacaggaacagcaggttcggcatgagtgtgaagttacaaagcctgagaaagagaagggtaagaattggattgcatcttctgtgtgtgagacgtggtggactgtgcctttccctctgaggttgtgcttagcacccttgtattttgttttttgcttttgttttgagtcaggtttactgaagcataatttatatgtagtaaaattcactctttttagatgtacaggtcaatgagttttcacaaatgcgaaataattgtggtctaatcaggaccactatcaagagataagagatatctatcaccccaaatattttagctgaacaaaatagcaagaaaagggtacaaagggaacctggaccttcaccttgctcttcttcctcttactgtaggggtgaataaaaaaagcagtgccaggccagctacttgggaagctaagggagaaggatcacttgagcccagttcaaggctgcagtgagcaatgattgttgcactgcacttcagtctgggcaacatctcttaaaaaagcaaatagtggccaggcatggtggctcatgcctgtaaacccaacactttggggggccaaggtgggtaggtatacgaggtcaggagttcaagaccagcctggccaagatggtgaaacactgtctctactaaaaatacaaaaattagccaggtttggtggcgggtgcctgtaatcccagctactcgggaggctgaggcagagaactgcttgaatccaggaggctgagattgcagtgagctgagatcacgccactacacttcagcctgggcgacacagcaagactctgtctcaaaaaacaaacaaacaaaaaaaaaaacaagtactgctagtttcttaatcaaggcaaagaaagccacatgcttcattactcattttttaacatttccttcaaattattgtaaatggccactatctttcatttctaaacgtcacctggatttttttttttttttggttctatactttcttttttgttgtttttctattgagacagggtcttgctctgtcttcaggctggagtacaatggtgcagtcatagctcactacagccttgaccttccaggctcaagtgatcctcccacctcagcctcccaagtatctgggactaccggtgtgtgtgccaccacacctggctttttattattattatttgtagagacagggtctccctctgttgccctggctggtctcgaactcctggtcttaagcatttctcccatttgggcctctcacagtgctggcattataggtgcaagccactcgcccagcctcctttattttctttgtcactgaaattcttcttcctaatttttgctccttacattttttcatttcttcttttttttttctgtcatagaactaattacattatattgcagtttctagtttgcttctctttttctcttgccagactaaaagggaaggggttttgttttgttttctgagtcagctacagtccctggcctagtgtagaccctcaataaatgtctgtttgatgaatgactggttttatatgtaaaatcatgctttacatgctacctattcctctgttcaatttccaagtcagcttcaaattacctttcttctgggagcatcctgaataaagtagctgaaagaaaggggcctaccttttctcaatagccttgcagaaatgaattagccttgcagaaatgattaccatgtaatcagtgatgggtgtatagtttaaatacaaaaagtaaatgtggctgctgtaatcccactactttgggaagccagagtgggaggattgcttgaagccagatgtttgagaccagcctgggcaacatagtgaaaccctgtcctctacaaaaaataaataaatagctaggcgtggtggcatgcagctgtagttctagccacttgggaggctgaggcaagaggattgcttgagcccaggagttcaagactgcagtgagctatgtgattgcaccactgtactccagcgttggcaacagagcaagaccatgtctcaaaaaaagtgaatgtaatgtcagtagactcttgaaaatgtcccttaccctctggatctgttaaaaatgttattttatattcaaagttcaggttgttttttggtttcatcctctcttgcttttttaaagttgtatatgtgattatgtcattactggaagagtcttattcctttcccttaatctctcactcttgccccctgcccctgtgtaggactgaatacttcattctgttgtagagggtctttgtacacagtacattattacattatttaatttattcactccccacctgtgaccttcctttctctgatgtctccttactaattccttcactttcacttttcctttcagctgtcatccactctttcctttttacttatctgctgaattaacttgctcacactgattaaccctcttttgtttgttattagtgctgcttagagtctttcttctattttctccatccagctttccttttactctctcattctgactttgcatccccagtcatgctcctagcctttgaagagttatccttagctacaagaaaaactggtaaataaaaatataaaatgaaacaaaacaaaaacttcacattcttctcacccgtctgcttgtgtatctgagcttaagttttctctattttcatttaatttcacccttaggacacaggccatttatttagtaaacatttgtttaatgtctgttatgtaccaggctctgtgctagagaaaacaaagtctgctctgcatgtgcttacagtctcttggggcattgtgcatcaggggtgcagggagcgacagacatgaataaattatcatagcgttgagattaaagctctgttgaaccacacaggagagcagttactgctgtccaaggagattaggaaaggcgaaggcatttttgtgaacttcatgttattgtcaaggtcttatagtacattattctttctttatggatgaggacacagagcccagatgatttaccttacttttttaagattacacagttagtgataaaattgggcaccacatctacatttcttcattttcagttaaaatgtcgtccctttcttatgggccctgggggcctcaattaacctagctttttttattttccatgtgacaagttatcttcaagactgtacagccatgccctttaagacagtttatttgcttgcttgctagcttctctgtgtgtggtatcccatgataaaatttaaactatttaaaataagtcacctcccaccagaattccccatctttccccaaagacagtcacagttaacaatgtcttgtgtaccattctgtaactattttacgcaatcacaagcatccacaatgtttttactttgcacacatggcttcattatatttttttttccttttagttgcagattcctttccccaagcatcaaaagacaagtaattggtggtatatatttaatattgcaggtgaggagacaaggattgagaatgggaagcttattgtagtaacagactcttgtggaagagtagagtcatctgggaaaatatctgaacccatggaggctcataatgagggctctaacttggaaaggcatcaggccaagcccaaagagaagattgagtataaatgctcagaacgtgagcagagattcatccagcacttggacctgattgaacatgcgagtacacacacgggaaagaaactctgcgagtctgatgtgtgtcagagttccagtcttacaggacataagaaagtcctctctagagagaaaggtcatcagtgtcatgagtgtgggaaagcctttcagaggagttcacacctcgtcagacatcagaaaatccatcttggtgagaagccttatcagtgcaatgagtgtggcaaagtctttagccagaatgcaggccttttggaacatctcagaattcatactggagagaaaccttatctatgtatccattgtggaaaaaattttaggcgcagctctcaccttaatcgacatcagagaattcacagtcaggaggagccctgtgagtgcaaggagtgtggaaaaacctttagtcaggccttactcctcacccaccatcagagaatccatagtcactccaaaagccatcaatgtaacgagtgtggaaaagctttcagtttgacctcagaccttattcgacaccacagaattcatactggagaaaaacctttcaagtgtaacatatgccagaaagccttccgactaaactcacaccttgctcagcatgtaagaatccacaatgaagaaaaaccctatcagtgtagtgaatgtggagaagccttcaggcaaaggtcaggtctttttcaacatcagagatatcaccacaaagacaaactggcttgatgaggtgttctctccttgtagaacatcagagaaggcacattgactagcaaacagcactttaggaaaagtcaccgtagcccactgtggcatcagaaaattcttgggggctgagttggaggctccctgcctctattctctctcctttgctttccttgaagtcagctttggaccacaataatttcactgtagatgatatgctaggatcaaagttaaacagcattcttcactgcaggacatctcagagcatgtaacataactgcatgattatatactctaagcaatagagagcttcatgactgagtaagagttttgaagtcagcagtgaatcaagtgcccacagatttgcaggcttaagcagaacaagggaagattgatatttttggatatgctatagcagctttctcctatgaaataaaactgatgatgtttggaagtatactactctcaaaggtgtctttaaagtacaggttaatggtgaacattttcccccagtggcttcacctcattcctcccactggccttaccccttccttccccagtggaagcattttcaaaagcaaagataattttcgctggtgaacttcagaacttgccttcagggttagcttcatgtaattttaccatttcccatccccattccccaccacattatgtcaagattcaagttataaattaacgttttacttagactttgaaagagatttcatgagtaatttgaatgaaccttgctgaattaatctgaatagcaactgtctgacttgataactccagtgccagtatagtggctgctgcatagacactattcagtaaatgtctgatgaaagaaattggactttttccctttaatactgatgatgcaattttgaaatgttgcttgttctggaatacttcggaagttaaacaataaagtcagcttggagaggagatcatgatctttatactgtgaatagcagaatgtcacagatgaagaatattaaaattaggggcgtccactccaaaacatatcaccagagtgacaacttcagccctcagcctctgcaatccatatatatcctggtcttgggagtccatagaatactgtttccttctaataaaggtttcaaacaaa

SEQ ID NO: 831 - DNA, 2339 bp, Homo sapiens
  misc_feature (2274): n equals a,t,g, or c
caagttatcttcaagactgtacagccatgccctttaagacagtttatttgcttgcttgctagcttctctgtgtgtggtatcccatgataaaatttaaactatttaaaataagtcacctcccaccagaattccccatctttccccaaagacagtcacagttaacaatgtcttgtgtaccattctgtaactattttacgcaatcacaagcatccacaatgtttttactttgcacacatggcttcattatatttttttttccttttagttgcagattcctttccccaagcatcaaaagacaagtaattggtggtatatatttaatattgcaggtgaggagacaaggattgagaatgggaagcttattgtagtaacagactcttgtggaagagtagagtcatctgggaaaatatctgaacccatggaggctcataatgagggctctaacttggaaaggcatcaggccaagcccaaagagaagattgagtataaatgctcagaacgtgagcagagattcatccagcacttggacctgattgaacatgcgagtacacacacgggaaagaaactctgcgagtctgatgtgtgtcagagttccagtcttacaggacataagaaagtcctctctagagagaaaggtcatcagtgtcatgagtgtgggaaagcctttcagaggagttcacacctcgtcagacatcagaaaatccatcttggtgagaagccttatcagtgcaatgagtgtggcaaagtctttagccagaatgcaggccttttggaacatctcagaattcatactggagagaaaccttatctatgtatccattgtggaaaaaattttaggcgcagctctcaccttaatcgacatcagagaattcacagtcaggaggagccctgtgagtgcaaggagtgtggaaaaacctttagtcaggccttactcctcacccaccatcagagaatccatagtcactccaaaagccatcaatgtaacgagtgtggaaaagctttcagtttgacctcagaccttattcgacaccacagaattcatactggagaaaaacctttcaagtgtaacatatgccagaaagccttccgactaaactcacaccttgctcagcatgtaagaatccacaatgaagaaaaaccctatcagtgtagtgaatgtggagaagccttcaggcaaaggtcaggtctttttcaacatcagagatatcaccacaaagacaaactggcttgatgaggtgttctctccttgtagaacatcagagaaggcacattgactagcaaacagcactttaggaaaagtcaccgtagcccactgtggcatcagaaaattcttgggggctgagttggaggctccctgcctctattctctctcctttgctttccttgaagtcagctttggaccacaataatttcactgtagatgatatgctaggatcaaagttaaacagcattcttcactgcaggacatctcagagcatgtaacataactgcatgattatatactctaagcaatagagagcttcatgactgagtaagagttttgaagtcagcagtgaatcaagtgcccacagatttgcaggcttaagcagaacaagggaagattgatatttttggatatgctatagcagctttctcctatgaaataaaactgatgatgtttggaagtatactactctcaaaggtgtctttaaagtacaggttaatggtgaacattttcccccagtggcttcacctcattcctcccactggccttaccccttccttccccagtggaagcattttcaaaagcaaagataattttcgctggtgaacttcagaacttgccttcagggttagcttcatgtaattttaccatttcccatccccattccccaccacattatgtcaagattcaagttataaattaacgttttacttagactttgaaagagatttcatgagtaatttgaatgaaccttgctgaattaatctgaatagcaactgtctgacttgataactccagtgccagtatagtggctgctgcatagacactattcagtaaatgtctgatgaaagaaattggactttttccctttaatactgatgatgcaattttgaaatgttgcttgttctggaatacttcggaagttaaacaataaagtcagcttggagaggagatcatgatctttatactgtgaatagcagaatgtcacagatgaagaatattaaaattaggggcgtccactccaaaacatatcaccagagtgacaacttcagccctcagcctctgctttncatatatatcctggtcttgggagtccatagaatactgtttccttctaataaaggtttcaaacaaa

SEQ ID NO: 832 - DNA, 1726 bp, Homo sapiens
gaagagctggagctggaggcatgcggcccacgaagggtagaagtaagttcatttctctggtagggcttaggggaggggtagtcacaggtagggcttgggatgtggggctgggatggctcctacagggccagaaggcaaagaaagggcagcagatgggcacagcagggacaagggtgtggtgaggaatctgactgctccagcccaagctggcatggcctctctgctctcgccttctgccctctttctgtaatctttcatctctgaggatgttgggccattcctgggtccctccttcttcctgcaattctctctacccttccaccctgttgccctctcccctccctcgcttcctattgtgtcctgcccactgccgattccatcctccttatctcatgtctatccatgattgacatgatggaaatggcacagtagagtccaatggtgataagcactctccgtgtttgcaggtaccagccatgaccaagagcccttcacatcatctggcaatccatccagaacccactgaatggaggacagcacagcgaggtctttctcattttgtaactgcaaaagctggaacaagagccagagaagccaaagaagcagtacaagtccaacagcttttagaataaccctgagaaaatggttgaattttgaccagttttgcaattggatactatgagaagagaccttccctcctgcactggatttcatcatcatacctggaggccattcctcatgggactttggccatctcatatccacctttaagcatgttattcccatttcagctgtggtagctctgggtatccttccctaggagaaaatattaatcttttctccctctgagttctggattaaactgtcttatctgaaactgggtcactttaggctagaagcaccactagacattcctgttctcagaagttgccaagttcatgtcatatctgtttcattgttaacgggatccacttctgcaagaggctgcctggccagatcagtgtgtctcctggtcagctccttgatgcccttctcctctcccctgcccaatcccagctgagacttgcactgtggtgactctgtcccctcctggtgctttgactggatgtgtgagagaaagtatggtctgtggcactgacatctttgtgtgtttggaggtgactggaacacggatccacccctggaggaaggtggccgtgaaggaggccagcctcagctcagcgttctactctcatcgctcttactcccgcctttttagtgcctgccctactccaggataattgtgcttttcttttttcagttaaatgttagcattgctatttttcattattgcaaagcagcacatgcttgttacaaaaactttggaagtgtagacaaataaaaagaagaaaaagctacttccaaatcctacttaccccaaagacaagatgatcatttagtcatatagtatcatacatatataatatgtacacatatattttaatgtaagtgtagtgtcacaatatcatgtatagtctttcataaaacacgttggcacttaatatcttatatgaacaactttctagagcaacaagcttagtttacagcaattgtaatgtaagagtactcatttacatagctacagcatccctttgtttacctcatctcttatggattgatgtttaggttgtttccaacttttctccacctaaacagcattaataaatgtggttttaggtttcctctt

SEQ ID NO: 833 - DNA, 1721 bp, Homo sapiens
gaagagctggagctggaggcatgcggcccacgaagggtagaagtaagttcatttctctggtagggcttaggggaggggtagtcacaggtagggcttgggatgtggggctgggatggctcctacagggccagaaggcaaagaaagggcagcagatgggcacagcagggacaagggtgtggtgaggaatctgactgctccagcccaagctggcatggcctctctgctctcgccttctgccctctttctgtaatctttcatctctgaggatgttgggccattcctgggtccctccttcttcctgcaattctctctacccttccaccctgttgccctctcccctccctcgcttcctattgtgtcctgcccactgccgattccatcctccttatctcatgtctatccatgattgacatgatggaaatggcacagtagagtccaatggtgataagcactctccgtgtttgcaggtaccagccatgaccaagagcccttcacatcatctggcaatccatccagaacccactgaatggaggacagcacagcgaggtctttctcattttgtaactgcaaaagctggaacaagagccagagaagccaaagaagcagtacaagtccaacagcttttagaataaccctgagaaaatggttgaattttgaccagttttgcaattggatactatgagaagagaccttccctcctgcactggatttcatcatacctggaggccattcctcatgggactttggccatctcatatccacctttaagcatgttattcccatttcagctgtggtagctctgggtatccttccctaggagaaaatattaatcttttctccctctgagttctggattaaactgtcttatctgaaactgggtcactttaggctagaagcaccactagacattcctgttctcagaagttgccaagttcatgtcatatctgtttcattgttaacgggatccacttctgcaagaggctgcctggccagatcagtgtgtctcctggtcagctccttgatgcccttctcctctcccctgcccaatcccagctgagacttgcactgtggtgactctgtcccctcctggtgctttgactggatgtgtgagagaaagtatggtctgtggcactgacatctttgtgtgtttggaggtgactggaacacggatccacccctggaggaaggtggccgtgaaggaggccagcctcagctcagcgttctactctcatcgctcttactcccgcctttttagtgcctgccctactccaggataattgtgcttttcttttttcagttaaatgttagcattgctatttttcattattgcaaagcagcacatgcttgttacaaaaactttggaagtgtagacaaataaaaagaagaaaaagctacttccaaatcctacttaccccaaagacaagatgatcatttagtcatatagtatcatacatatataatatgtacacatatattttaatgtaagtgtagtgtcacaatatcatgtatagtctttcataaaacacgttggcacttaatatcttatatgaacaactttctagagcaacaagcttagtttacagcaattgtaatgtaagagtactcatttacatagctacagcatcctttgtttacctcatctcttatggtttgatgtttaggttgtttccaacttttctccacctaaacagcattaataaatgtggttttagtttcctctt

SEQ ID NO: 834 - DNA, 117 bp, Homo sapiens
atagagatggggtttcaccatgttggccaggctggtcttgaactcctgacctcaggtgatccacctgcctcggcctcccaaagtgctgggattacaggtatgagccaccatacccag

SEQ ID NO: 835 - DNA, 2355 bp, Homo sapiens
taatagcaacttatattattttactatttacagagagtgtccacatatgttaacttccttgatcctcacaaacaccctatcccttgggtattttctaccagccccatgaggctcagagagatttacatgactttttgagggtttgaacccaactctttggtctcaaaaacatctcattccagtacacctcattgcctcccaagccctgtatccaggaagacctgactcaccagcatgctttctgtgcgaaaggacaccagagctgagaagtaaatcgacaccacccccaatccctgcaacttcctcttctctgtcctgtcattgagaacaccagcctaagggcacgtttttctccttccacgttctattaaagctcagtagtctaactcctactattgaaaatgagagaaacaggaaggaaagtctcaaattccaactttggaaaccacgttgaaagaaggtgctctcatctggacatgatggttcacgcctgtaatcccagcactttgggaggccgaggctggcagatcacgaggtcaagagattgagaccatcctggctaacatggtgaaaccttgtctctactaaaaatacaaaaattagccaggtgtggtggcacgtgcctgtagacccagctacttgggagtctgaggcaggagaattgcttgaatccaggaggcagatgttgcagtgagccaacatcatgccactacacgccagcctggcaacagagcaagactctgtctcaaaaaaaaaaaaaaaaaaaaaaaaaaaaagaagaagaagaaggtgctctctcatcattcttctgtacattcatttgttcattagacagatatgtatagagaatctgctgtgtcccaagcactgttctaggtgctgcggttatagtggtagacagaaaggtaaagttcctgccctctcgaagctcacatcctactttcagggggtaatgagcaagtagatgatgaacaaatgttttatatagttctagggctataaggagtgtagagaaggctgatgagatgcagtgtaactggcaggaggggagtgagaactacttgggtagatgatcaggagatactctgcaagaggaaacatacagaaggagcctgacatgagaaaactggggcagcagttttccaggaagagggaccagcacaggtccaagttgaaactcagaatggaattttaggaaattatattcttcatgatggttagatcctgtgggctatcatcactgcagttcaacaatgtggtgcctagtaggaagagttctcccaggaaccctccacgtgtgctatgggatttctgagaaaaccagttctgagttctaggcagtggactcacagttgaacttggagggaaccaagaattgcttccatcatagccttactaagaaatgaccatggcatggcctgagtgcttcggcatggaggaccagaaggggaagccctaatttgccagttgcagactcttgagccttgtgactctaatgacgacaaaaattaggagattttctaggactccacgtttgcgattttgagagtagtgctgctggggttcctggtttgggttctattgattgtttcattgtttctgtgtgcaagttaccctctctaagcttagtttaattaatattatattaagtgaggtagttagattatatgaaccctaaggctccttttattcttaaccttaaaataaaaacattttgtaaacagtttttctttgtgtgtgtgtggtggccttttctgtgcctctgctttggatgaggttacagggctgagtgcaagtgagtcattagtggttcctttgatataagacaggtgatactattgaacactgttggtggtagaccagtggttctcaaagtgtggtctctggaccagcaatagctgggcttgggaacttgttagaaactctagctgtcagcctccaccccagacctactgattaaaaaaccgtaggagtgtaaccaaaactctgtgttttaacaaagtctacaaatgattctgatgcatgctaaagtttaggaaccactagagtagagtatgtgctttaagatttgggtctaccggccaggcgtggtgtctcatgcctgtaatcccagcactttaggaggccaaggtgggtggatcccaaggtcaggagtttgagaccagcctggccaacatggtgaaaccccatgtctactaaaaatacaaaaattagctgggcatggtggtgcatgcctgtagtcccagatactcgggagggtgaggcaggagaattgcttgaacccaggaggcagaggttgcagtgagccgagattgcgccattgcactccagcctgggcgacagggcaagacttgg

SEQ ID NO: 836 - DNA, 972 bp, Homo sapiens
ctcagcttatagaaaatgacatttgcctaaggtcaataattgatagagctacaagtgaattcaggtctactgatttatgcctttattatcaaagacacactgaatggctaccttaggccataacctgtgcatttaactactagattttcctcataacaagtgggctttgttgaggagttggcatgcatctcaattctgataatgagagcaaaatatagtatgtggaaagtgtattttccaaagatggccacagcaatattttaggtcttacacgctctatagaaccactccccaaaacagattgagttcattttcatttcctcttgaattttggcaggcttgtgactattccaaagaatgaattacatggagtgatgcaatggaatgtctaagcctgagaatacagtgtctccctttttccaggagaagctcattttggaagctggccgccatgctttgaggaagcccaggccacataaaggtggccatgaacaagtgttttaggaagttgtcccagctaagattttagctgacagttgagatcaatcactagacagacaagtgagtgaatcttcagatggtcccagcttccagctgttgaatcttcctgctgagctccaaaccttgtgaacaggatgattaagttatctctgctatgctcatgagcgtaagaagtggttgttttcagcttactctaagttttgggggtgattcgttatataactgtattaaccacaacatcatgttccatttttaccttcgctgtcaggaaactcaaggtcaaatttattccttaaatacagcaactgcaatagccttaagtgttagaacaactactttttaattttataacactgagcatatatttctattttattaatcttattttgtctttcgttgaaaaaatatgaagtgtacataaacaacaaaatgacccctacctaccccctaataataaaagtatgaatttaa

SEQ ID NO: 837 - DNA, 972 bp, Homo sapiens; identical to SEQ ID NO: 836

SEQ ID NO: 838 - DNA, 572 bp, Homo sapiens
gcacaaaaatcctccatgatttcagcactcaggtataggaaattgggagtagctcccaagcccattctgcccaagtggcttagcatccttgggccattgaatatgacttgaacagctgcatgcagctgctggtgacaaaactcccaggaaacctggtggaactaaaatcagaaatggtgatccaattaatgccgctgaacctcaaatgctgactccaaacttggggactctgcattagcattaataatgatttccttaaaatcattcagtggtttggatagctatctaaatctcattgagaagccaactctctttgcttagaaatgtgtacttacagcacttaggcaaatgatccatggcgagataaggcccttataccgggtgcttgaaagggcagtacccctcatagctaaaagatactccaaggacatttcatgtgagcaggataaatgagaatggcaagcattaagattaacttcatgaaagttaattcaagacagagtgacaatttcaagtcttttttaaacatatggttctttttaacaataagacattctacatgggtataggaa

SEQ ID NO: 839 - DNA, 597 bp, Homo sapiens
gcacaaaaatcctccatgatttcagcactcaggtataggaaattgggagtagctcccaagcccattctgcccaagtggcttagcatccttgggccattgaatatgacttgaacagctgcatgcagctgctggtgacaaaactcccaggaaacctggtggaactaaaatcagaaatggtgatccaattaatgccgctgaacctcaaatgctgactccaaacttggggactctgcattagcattaataatgatttccttaaaatcattcagtggtttggatagctatctaaatctcattgagaagccaactctctttgcttagaaatgtgtacttacagcacttaggcaaatgatccatggcgagataaggcccttataccgggtgcttgaaagggcagtacccctcatagctaaaagatactccaaggacatttcatgtgagcaggataaatgagaatggcaagcattaagattaacttcatgaaagttaattcaagacagagtgacaatttcaagtcttttttaaacatatggttctttttaacaataagacattctacatgggtataggaatggaaattttaatttaaattttacc

SEQ ID NO: 840 - DNA, 187 bp, Homo sapiens
gatgggattagtgtctttataaaagagacctaagagagacctctcaccccttcctccatgcatggacacaggaagaagatggctctctacaggaagagggacctcaccagacaccgaatctgccagcaccttgatcttggacttccagcctccagaactgtcagaaataaatttcttttgtttgtaa

SEQ ID NO: 841 - DNA, 187 bp, Homo sapiens; identical to SEQ ID NO: 840

SEQ ID NO: 842 - DNA, 1027 bp, Homo sapiens
cagaatggtttgtttaacatgactctggtgtccccctcactgatcttatatttgaatgacacaagtgctcaggcttatcacagctggtattcccttcactataaaaggaggccttcccagggtcctgaccaggagagaagtctgtctgcctatcctgtgggagaagaggctgctgaggatgggagatcttcccatcaccgtcaccgcagaggtcaggaaactgtcagttctgaattgaagaagcccttgggcccagcttccttcaatctgagtgaatacttcagacaatttcttcttccccaaaatgagtgtgagctccatgactttagacttagctttagtcagctgaagtgggacaactggattgtggctccgcacaggtacaaccctcgatactgtaaaggggactgtcccaagggcagttggacatcggtatggctctccagttcacaccatggtacagaacatcatctatgagaagctggactcctcagtgccaagaccgtcatgtgtacctgccaaatacagccccttgagtgttttgaccattgagcccgatggctcaattgcctataaagagtacgaagatatgatagctacaaagtgcacctgtcgttaacaaatggtcctcttaaaaccttgagcctatttggcaaagtaactactgtgtgcctatgtgtgccttcaagagaaagcttcatatattaagtctctaaatgtagcatatgttatataaagaggagcctgtgtaggttagtaccttctatggcatctatcaggataaagggataacatcaattgttgctacagagcctttttttatttccaaatttaaatgaaatataattattgtggagaactttacatttttttccttgagtgattttttttcttttcataggagtcttattcttgatagggaaaaaaccttaattagcatcaatcctggatggacttgcagctataaataggcaattcagattgctgtagtcttaatagaagaataaatttctgtcaatggcataaa

SEQ ID NO: 843 - DNA, 1004 bp, Homo sapiens
ctctggtgtccccctcactgatcttatatttgaatgacacaagtgctcaggcttatcacagctggtattcccttcactataaaaggaggccttcccagggtcctgaccaggagagaagtctgtctgcctatcctgtgggagaagaggctgctgaggatgggagatcttcccatcaccgtcaccgcagaggtcaggaaactgtcagttctgaattgaagaagcccttgggcccagcttccttcaatctgagtgaatacttcagacaatttcttcttccccaaaatgagtgtgagctccatgactttagacttagctttagtcagctgaagtgggacaactggattgtggctccgcacaggtacaaccctcgatactgtaaaggggactgtccaagggcagttggacatcggtatggctctccagttcacaccatggtacagaacatcatctatgagaagctggactcctcagtgccaagaccgtcatgtgtacctgccaaatacagccccttgagtgttttgaccattgagcccgatggctcaattgcctataaagagtacgaagatatgatagctacaaagtgcacctgtcgttaacaaatggtcctcttaaaaccttgagcctatttggcaaagtaactactgtgtgcctatgtgtgccttcaagagaaagcttcatatattaagtctctaaatgtagcatatgttatataaagaggagcctgtgtaggttagtaccttctatggcatctatcaggataaagggataacatcaattgttgctacagagcctttttttatttccaaatttaaatgaaatataattattgtggagaactttacatttttttccttgagtgattttttttcttttcataggagtcttattcttgatagggaaaaaaccttaattagcatcaatcctggatggacttgcagctataaataggcaattcagattgctgtagtcttaatagaagaataaatttctgtcaatggcataaa

SEQ ID NO: 844 - DNA, 102 bp, Homo sapiens
tacctgtagtcccagctactcgggaggctgaggcaggagaatcgcttgaacccaggaggcagaggttgcagtgagccaagatcgcaccactgctctccagcc

SEQ ID NO: 845 - DNA, 102 bp, Homo sapiens; identical to SEQ ID NO: 844

SEQ ID NO: 846 - DNA, 493 bp, Homo sapiens; identical to SEQ ID NO: 171

SEQ ID NO: 847 - DNA, 493 bp, Homo sapiens; identical to SEQ ID NO: 171

SEQ ID NO: 848 - DNA, 493 bp, Homo sapiens; identical to SEQ ID NO: 171

SEQ ID NO: 849 - DNA, 480 bp, Homo sapiens
gtatataagatgtaacaccctcagaagggttaagttttcacctgagttttcatcttcaaccaagtcattgggatggtgatctagaaggacctctaagatctagaaggataaagatctggtccaaggagtacaaatatgtaatggatctaccaccagtgtcccctgctgtactcttggcagacatcactaatccatcacagcatgccttcccactgatcacagatgtagcttcagggcattcgagttaccacttaagatggatatgagtgaccctcccttatctcactcttctcctttcacagaagcaggatctgaggcccagagagggaagctataataaactcccctaagtcaggtcccttctaagaggcagaggtaggtttagaactcaggcctcagaaacttccagaagccaagccatttgggctgtagttggtggacagtctatcagcgctctgcagatgtttcttctcagttagg

SEQ ID NO: 850 - DNA, 480 bp, Homo sapiens; identical to SEQ ID NO: 849

SEQ ID NO: 851 - DNA, 480 bp, Homo sapiens; identical to SEQ ID NO: 849

SEQ ID NO: 852 - DNA, 593 bp, Homo sapiens
gcctatcagcctcctgtgtcttaagcagagtggagacgggggtggatccaggcgcaccagtaagttgtactggagttaagcagtaagctttctgggcagaggaaagtgcgggcgtaaaggtccaaggcttgaaaaggcgcagcagcacctttttctctttggggaaagaagcggtggctgcggggaataaaccaactctgtagaggggcggggccgtgggaaagcggtggaacggggcaggaaggctgggcgtcatttgggaggcaaggaacttttctgtaaggcatagcgccctttctgcacgggacctgtccaggttccacgccacaggcttctgcagttcctgcaaactgttcccatcccgccccgcgttgcacgtcgggatttggagttcgcgatgctgagagctgtttccacgtggcgattccgacttgacccgtcgtgctccggcgcccgcctagggggaccgaggagtttgtcatttcttgcctcgttagggtgcggaacgaaaaccatttgatttatcctagaaaaggaaaggctgaagccaactaagtaaaagttttccattaaatgaatgcacgttgtagaaa

SEQ ID NO: 853 - DNA, 593 bp, Homo sapiens; identical to SEQ ID NO: 852

SEQ ID NO: 854 - DNA, 593 bp, Homo sapiens; identical to SEQ ID NO: 852

SEQ ID NO: 855 - DNA, 572 bp, Homo sapiens
ctaaatttatatgtctagaactagagctagagtgtatgcctacatacacacacacacacacccatacatatatattcaaacataatatatgtatatccacatgtattcaaacacagaattatgtttagataattatggttatatgctggtatgccagagccagactgcctggcttcggttccaggccctagttggatagctttgggctactcagcctctttatgcctggacttcttcatctttgaaatgggataataataatacttatcccataaagttattgtgagaattaaatgaaataatatatgaaaagcccttagaacaggcattgacacattgtgaaggtaatgtattagctattttgatgattatgcattttgtctgcaacttgatttttatttaacatatgtgggaaagtagacaaacatagccattttcaatgattccataatattccatagcacgagtataccattgtttatcgaaccatttctctcttgagaaacattgcagattttttttgcagtttctacgattacaaataatgctgcaataaacatctttctacatat

SEQ ID NO: 856 - DNA, 2898 bp, Homo sapiens
taaagagctcacctgaggagaacagatgctgatatgacaatccagtaaatcatatcgaacctccactccatcactactgccctgaaacaggctctgtggggagaagttacaaggactttaatttgtttctcccactgaagcctgtcacttccccatctcaaaggaccccagatatccacacaccagaggaaatgcaaaacgccggagaccctgggtcttctgaaaatggagaaccctgtttgtggtactatccacagccactaccacattgtcttcgtggcaacgagttgggtggctgggggatgactccttgaagatcatcgtcatcacagaaacatttttttctagcttccgtctcaacctataaaggacaggagggacagaactgcaaaaaagcagtctcagggctctgctggtctttaacccttgttcctgtcattttcccatcctgacctgtgttcctcaagggctctggtgatattgatgtttgagatgacatccccatacaccagaagaaagtcagagcgcaccaaagccttggcatcaacatcacggaggacatctcccagtgatcgatagagctctgatgtaattattcgaaccacattgagagatgtagggcggcaccactttgacttcctaaaggaagggagggtgaggggaatgagtgtatcaagcataaagatcatttgagccttccccatttttcaccccctttcagcactcacagtccttctcgatggcttttttgggttcttgccagcgtcttcaacttcaaagagtattatgaactataatgaatgctttcagcatcctgtgtcaccagtcttgttttatgggttaggaaacatggttatttcctctccataccttgaccccttgtccctaaacatcaatttgaactcaaaatcctgctgaagcctagggtacacaaagtagcctgggaacacgcttcacgtcagctttccccttctgcaatccatataacatttaggaactgtctgatggagaccatgctaatgtcctagtctttacatcctggacttccataagcaatgcgattccctagttttcaagatttcaacaaacatgtaagtgctcactatatgcttgggactgagctaggcagtgggaatacaaagatgacaaggagctcatttatatccttgaaggtgagaacaaacaagatttagaaactcagtgggaaaacaaagatgttatcattgtaacttccatactgaagccattaaataaaagcaaagtccactggcaccaaactttataatgagattcagaaaaaacccaagtttattctttaatctttgtcacagaaaacccaagacagacagatacaaagtttcagctgctcacctcctgataagtgtagaaaatacccttagaacttacaatgacatctaagtagacacatttttcccctctcacatttccccttagttacattcatcctgaaaaaactggaaaaagatggcgaaacatggaaagaaaagttgcagggccttacagtaaatgttctttgatttgagcagctttccagcaacaaaagacaaatgtttcctgtacacctgtggcagtcaggaattccagagtgtagtcaattaatgccacattggccaggggcaagaggacctgaaggatacaagatgaaaaaaaacttgaggtctcgaatccctttgggtaccccactgcaacaattttcactcctctattcgtatttccaaacagtgtaattttgctgtatctttccaattcaaagataaacaggttcctgcctttgatgttcatgccatgctctaagcctgagtctgagacattgcaatttggggatggtaagtacagaatctatgtgccttgtatcagacacagagctgtgacagaatggcagttcactgctggcaaaggataatactggaaatcaatcatatttccataaatttaagcattgctaaggccttcttccccataagatttccttccttgatccctttctaagtgtcagaggttagccatctcccgtcacttgtcaaaaatgaacagccattaggctttttcgagggaattagagaggattttccttaaatccaatgcagttccctctttctgaactgactgctgaacgacccagctgagtccaataccccattgtctagacaactcgggggctgatggcaatcaaccactaaacccattttgtcctttcgacagatagcaccggctatcattagaacctggaaggaaaaaaaaaatacactgcctgagatctagcccgctctttttaaggcatattaccgccctttcagaggcaaaaggtcgtttcttttcacctaagcaaccgtcatcggcaaggttaaaagcggcgcagcctcttctaggggcactgaatccccgcgtgaaggcttctctcaagcgctgtttctacatttagctctcttcattcctttcaaacccgaggtggacagcattacgaatgcccaaatctgccggccactaacttggtcagcagtcatcagggtttagacagtccctctgcatccggttttaggataacagcatagacgcaggtccttcaagggcatgctgttgtagttagccgaaatgagaacttgctccagccctgccacccttcctgccctctggctgctcgcgtgcgcggcgctcacccgaggctggtccttggagatggggaagaagcggcgatcgaagctatcggccaccagaactgcttgtaggggcggcggcggttcctcctccgcccctctggctcccccgccaccgctgcctcccggccccgcgccgctgcgcttgttagcccgactaaccaccacaccaggcggcgccactacaggggccgccatcttcttctctcacggtcaccacttc

SEQ ID NO: 857 - DNA, 2898 bp, Homo sapiens; identical to SEQ ID NO: 856

SEQ ID NO: 858 - DNA, 453 bp, Homo sapiens
ctaaatttatatgtctagaactagagctagagtgtatgcctacatacacacacacacacacccatacatatatattcaaacataatatatgtatatccacatgtattcaaacacagaattatgtttagataattatggttatatgctggtatgccagagccagactgcctggcttcggttccaggccctagttggatagctttgggctactcagcctctttatgcctggacttcttcatctttgaaatgggataataataatacttatcccataaagttattgtgagaattaaatgaaataatatatgaaaagcccttagaacaggcattgacacattgtgaaggtaatgtattagctattttgatgattatgcattttgtctgcaacttgatttttatttaacatatgtgggaaagtagacaaacatagccattttcaatgattccataata

SEQ ID NO: 859 - DNA, 572 bp, Homo sapiens; identical to SEQ ID NO: 855

SEQ ID NO: 860 - DNA, 31140 bp, Homo sapiens
ggtgctcgtggtggcaaagaagtctcttgcagaggagcagtatcaggactttgaagtaagttgttctgggacctttccattgcctttgcagccccacctgcctcccagtcactccttccaccatccctcatcctatgcgagccattctgatgtcatttctgggcacactgggttcactgttgttgaaggcctttgcacttgccgttctgtctgcctggaactctcttcacccacagagccccatggcccatttcctcgcttcttttgggtctcagctcaaaagccacgtcctccaagaagtcttcctggaccacctgtctaaggctccttctcactttccatccatcataccatttcactttgttcattgcatttgtcactgtcatcgcgtgctaccatttggggccaaaaaatatgtctaggagttgaatctggagaggccagaagaatataaacttgaccctgttcatatatttttttttaacattcatcttatccatctcctttcgggaataaaatatttttgaagacagggactttacaagtctggtttgttcttcttattcttgttcttcttcttcttttttttttttttttgagacagagtttcgctcttgtcgcccaggctggagtgcagtggtgtgatcttggctcactgtaacctccgcctcccaggttcaagggatccttctgcctcggcctctggagtagctgggattacagttgcccgtcaccatgcccggctaatttttgtatttttaatagagatggggtttcaccatattggccaggctggtctcgaactcctgacctcaggtgatccaccagccttggcctcccaaagtgcagggattacaggtgtgagccactgtgcctggcctggtttattcttatatccttagtagttaaagatagtccttggcatatggtatgccttcgggaaaatttggcataaatcattctcttggagccctaatttcttttctctttttttttttgcacatttattctgagacggggtctcgctatgctgcccaggctggtctcaaactcctggcctcaagccatcctcctgcctcaacctccttgtagctgggattacaagtgtgagccaccgcatctggttcggctccctaatttcttttcttttttttttttttatttgtgacagagctttactcttgttgcccagactgtagtgccaatggcacgatctctgctcactgcaacctctgcctcctggattcaagcgattctcctccctcaagcccccaagtagctgggattacaggcatgtgccaccatgcctggctaatttttgtatttttagtagagacacggttttgccatgttggccaggctggtctcaaactcctgacctcaggtgatctgcctgcctcggtcttctagagtgctgggattacaggcatgaaccaccacacccggcctccctaatttctttaagctgtaaaaatgttggggttgaaccagattattgacttgcttattgtcatcccatcccatagattgtgtgttccctgaggggagggtcctcgtcttgtttactgccgtgtctctggtgcctggcctaaatccagcgtgcaggaatgcaagggagggaggcgggacacgcttcgtggggccctgccctgctccatgcggggaaactgcctggatctctctttaatatatttgagttctttgtaagccattatttaacaagcattttagccccgatcaatgctacctgccttttaattttaaaagcatgtgcttcaagcgggcccattagatgactggttttcctccaggtttttgctaacatgataaagagaagaagcggcagtttgggttgatggtcttcagaagctcgacttggtctttagaaaacctggtgacccacagtttggcttacaaagtgcatgttgtgtatgggagaacttactgtttttttgagatcttggttgtgcccgtccctgagacaacccaatgaggttggtgctgttattgccatttcgtggccacggctcagagaggttaagtgacttgctggaagtctcccagcaggtgagtgtggagtgtagggtgggactcaggtctgtgcagtgtctacatggaggacttgtgaggaagctggaagcctatgtcacccctgtggggtccagctcacctgctggggtcccccaccccgtgtggtggggatcgggtgtggcccttccactcttggcactggccagtcagcctggcctctcctcaccctaagcagtgactgcatctgctggtgtgtcccaggcccgctacgtccaggccaagctgagtgtgcacgaccgctccctcaaagtggccacggtgatcgagagcctggagatggagatggaactgctgtgcctgacgggcgtggaggaccagctgcaggcagatgtgcggcccacgctggagaccctgaggaatgctggcatcaaggtagggcgggctgcccgcagggaagggcactccagggcaatgccagttatccctcagcagtgcagggagatcacagggggaaagggtgggaggagcagcagaggacaccaggagtgccttatctgcaatgggccacaggcactgtttctgcccctccaactgtgattttttttttttttttttttttgagacggggtctcgctgtgtcgcccaggctggagtgcagtggcatgatcttggttaactgcaacctctgcttcctggattcaagcaattcttgtgcctcatcctccctagtagctgggattacaggcacgtaccaccacgcctggctaatttttatatttttgtagatagagggtttcaccatgttggccaggctggttttgaactcctgacctcaggtgatctgtctgtctcagtctccgaagtgctaggattacaggtgtgagccactgtgcctggccctccagccctgattttggaagacatcttgtgtagcgtttgcctttactgtaccgatgactcccctgactccactgggctccctggtgctcaaggccgagcagtgtccagcgtgcatggctgctgattaaattctagttgagtgatcagcacgccggtctgtctgccgtgtggccaagtgagtgagtgaccacccagcagagtgaccgtcagcgccatcacactgtcgtattagcattttgcactctaccagtggcgacccaaaaaaaaatactaggagttgaatctggaggggccagcagagggcgcgtgaggacctggtcctcagtggaccaagggaggtgtgaacaaccaaactcattggcctggagctcctggaaacgtgtgcctgccaccggcctccactcaaaagtggctctctgctgcatcctggggcctgtcctttcagcagggccatggcaggaggacaggttagatgccaggcaacattcaggcccactggggactcccacccctgcgtgcctgtttccttgtaaacccaattctgtcgcttgcatttggctcacaggcctggttcgtcataaggaaatcaccaacgggaccttgcttccggaagtctggccgctggaggcccatttctgcttcatcgtggggtctgcagtggggccctggccattcctaagacttctggagtttccattttctgcttccatctttgtcctggggtttttctccttctcaaaactatgttagcccaagacgagatattttattcacagagtgtgcatgtgacttaccattctagtttcctgttagatgacaggaggaggggagtgcctgggatggggcaggttagttggtaattaaagtctaagatacgatcttgcacaggaaattttcttttcttttctttctttctttctttttttttttttttttgagacagagtttcactctgtcgcccaggctggagtgcagtggtgcgatctcggttcactgcaacctccacttcctgggttcaagagattctcctgcctcagcctcccaagtagctgggattataggtatgtgccaccatacctggataattttgtatatttagatatttagtagagatgggttttctccatgttggtcaggctggtctcgaactcctgacctcaagtggtccacctgcctcggcctcccaaagtgttgggattataggcgtaagccaccgcgcctggctgcacaggatattttctaaatcagccccttgtatggatgtagaaactgaggctaagtgaggcgtctccattccccaggttctcacattgggaagcagcagagccgggactggagctggggtcttggacccttcctgtagtaccttgccttcatcacagcatgggacattagccatgtcgtgcacctgatcgttcttttcatgcttttctggaacttgaacttcccaattccttccccagtgtttgttctcttacctcaaaccctgagaactatgactaaacgaagctcaccaaaaagaatattatttttaggacaggcgggatattgagggaaaacagacccagctaggggagagggcccgggaggctcagccctgagaggtgcccggtgccttccttctgcccgtctcactgcctgggtttccatcctacctctccctttacttcttctgtgacccttggcaaatgactgaagctcttagcgcttccatttccagcctccagaagctgtcatgaaggtaacagagagctcagcgtgggtgctgggcacgtagtggacactcaggagacaattgtcatgatcttctttcctatactttccctcctatccagattttctttgaccgatagccccaagactgctcccagctgggagcaaagagaacaaaagggttaatgaggtaaaatcacagagcaggaagcacattccatgaggactctaaagacccggattctgggcctggttaggacaagaggtagctgtgtggtttggggcaagtcatctaccctctctgagcccacagcagagaaatgcagtgtgagctaatgcacgatacggaagaacctgactcatttacggtcagcgttttataagctgagttaaaccccagaagggtctgtcttgctcatccaactacatagaaagtccacagcgtcaaaaatgagtgtttcctgtaggacagggaagtgccccctcacctgtacagcctttcccttcttttaggatatttatcactttaagaaaaatcctcagaaggggaattatgcggtccaaggaccgagcttcatagtacctcctgtagtgtgtggccaaatggccctttctagaagcatctgccagtttttgctgctaccagcagtggttgcttggagtcccagagcccttcagccagggcgcttgctgtgttgtgttggggacagcatgagtcggcaggaggtaaacggaacataccaagttcagctccatgttgttggaaactcagctgttgcagatgacaggccggcctcaaaaactaataaacaggacctctgtcacgccatgatttcaggtttggatgctgacaggggacaagctggagacagctacgtgcacagcgaagaatgcacatctggtgaccagaaaccaagacatccacgtttttcggctggtaaagtgtcctctgcgttagggccatgtggggatgatgttcgatttgtcctataacctcctaaccttgagtgggccccttaagaagggaggggcagcatgtgaattacctagggtggggagcatcaaccacggttgctttggatgggatgattaatgacccaggcgccggctggagagtttcttccagtagtggtttgggagtacctccttctagccctgtgctaatgccatgctcttaaccttttgggggtcgtggtccctttgagaagctgatgaaagtcaggcactccccccgaaagatgcagatccactcatacacatgaaattatgcatgggattcctgggatttcacggaacccctgaaagtcaagtccttggataagaaagaaattccaggccacagatactggtccatctgccctcctgagaggggaagcatttaggaccattgaggagccttttgaaggaggtgaactggatgggcaaatgagaaatcgcccgcccttgtggcagacattgaccaagacaatgtgcacatcaggaactgctgccagtgaggactgtgctaggctttattgcattggggaggtagggggaccgggtcctctttggggcaggatatagtaatcccactgatctgaaaccagagccacgatggcaaaccactggagggtctctagatgtttgggggtctcgccctcaccccgcctttggtccatagcacacagaagcttcaaaaaatccagggatttttgaaatagcatagtattgtatagaggcaggtacagtcagttctcatcattcacagattctttgtgaattctcctcctcccaaaatttatctgtgacctccaaatcagtactcttgatattttcactgtcatacgtagagtggcttaaatctctccttttttttttttttttgagatggggccttgctcttatcacccaggctggggtgcagtggtgcaatcttggctcactgcaacctccgcctcctgggttcaagcaattcttctgcctcagcctcccaagtagctgggattacaggcgcctgccaccacacctggctaatttttgtgtttttagtagagacgggtttcaccattttggccaggctggtctcgaacccctgacctcaggtgattctcccacttcagcctcccaaagtgctgggattacaggcgtgagccaccgcgcctggcctagagtggcttaaaattttagctgcctgagacacacattcccacctgaggctgaacaagctcacgcactcccccctcctttcagccccgtgtgacgaaccagtgtcgtttttgcagtccatcgagtatccggttttttgcatttttatgctttttgttggcagtttgtcgtttaaaatggccgcacacagcgcttctttgctggcttgttttctggaacttgaacttcccaacatccataagtcacatcaacaggaaggctgttgatgtgacttatggagcgaatgcgtgtgttagatgagcttcctgcaggcatgagttacagaactggtggctgtgagctcaatgttaatgaatccaggtgtctttaagtagaaacgcacataaaataaggttatatatttatgaagatattgcaaccaggggcaaaaacctaaccctgtatttcccctacaggtgatggtttagtatttgctaattcagtgttcacagtgactttagaaaacatagctactatgaataatgagaattgactgtctgttctagaattcagggattgcaaactaatgacctatgtgctagccacctgtttttctaaacagcaggtattttgttttattggagtgtagacagaccggctcgtttgcatatggtgtacgactgcttttggattacaacggcagagctgagtggttgtgatggagaccatgtggtcctcaaagcctacaatagttaacatctggtcctttacagaaaagtggcccagtccctgctaggtgcctggctctgcatacctgggctacagcatactagccatgtgcctttagtcaggttagcagatgtcaccatgcttcagtttccttaggtgcaaaatagagcttcttctttttggcacctcatagagccgttgtgagaaataaatgagaaaaatccaccgaatgcatcatccaacacctggccgaaaatgaaagtacaggctttttttttttttttttttgagacagagttttgctcttgttgcccaggctggagtgcaatggcatgatctcggctcaccgcaacctccacctcccaggttcaagcgattctcctgcctcagccttcccaagtagctgggattataggcatgtgccaccaagcccggctaattttgtatttttagtagagatggggtttctccatgtgggtcaggctggtcttgaactcctgacctcaggtgatccgcccacctcagcctcccaaggtgctgagattacaggtgtgagccaccgtacctggccccccccccccttttttttttttaaaagacgagtcttgctctgttgcccatactgccagtgcagtggcatgatctcggctcactgcagcctctgcctcctgggttcaagtgattctcctgcctcagcctcccaagtagctagaattacaggcacccaccaccatgcccagctaattttctatttttagtagagagtgggtttcaccatgttggcaaggctggtctcaaactcctgacttcaagtgatctgcccgcctcagcctcccaaagtgctgggattacaggcatgagccactgcgcttggccagtacaggcatttttagtcctgggggaaattgtaggtggtggttggcacatgggctctcttgattcctgcagagtcaaccaataggattccatttggtgctgcctctggtggcaggggaggggagggacccttggctggggtggccgttgtcttcatgtgggctcctggaagccactgtttgttgttctatcatgtccggagagcaatgcctccttccccatctctgttcccttccaggtgaccaaccgcggggaggctcacctcgagctgaacgccttccgcaggaagcatgattgtgccctggtcatctcgggagactccctggaggtgagcttggggacccctgagagccagtcctcccagcagcctgggtcttacccggcttcggcaggggcactgcaggctcggcagcgacctccaccaacgcaccacctctccctccaccaacgcaccacctctccctccaccctgcaggtttgcctcaagtactatgagtacgagttcatggagctggcctgccagtgcccggccgtagtctgctgccgatgtgcccccacccagaaggcccagatcgtgcgcctgcttcaggagcgcacgggcaagctcacctgtgcagtaggtaggcgaggctcaggctgtgctgctggccctggcctgccggtgcaccaggctccctttccctaaggatatttggacactgctgctctttcttcaaattccccaggcccctttgttcaggtcatgatttttctccacctctcagactttggctctttttgttattatttttaatatttcccttggagagtagataagcacgtgccaggcctctactcctttgccagtggctcaagagtgcagccttccagggggtggagaccacacactgtggggttggatctgggttcaaatctttccactggcctttgccagtgggtgccccaggtggcttctttcacccatctgagcctcggtttgcttatggtagaatgggaataataattgtggcttccttaaatggtgtcatgaagactaaaaggggtcacctttttttttttttttaagacggagtcacactctgttgcccagcgggagtgcaatgacacaatctcagctcattgcaacctccgtctcccgggttcaagtgattctcctgcctcagcctcccgagttgctgggactgcaggcgtgcaccaccacgtgtggctaatttttgtatttttagtagaaacggggtttctccatgttggccaggctggtctcgaactcctgacctcaggtgatctgcctgcctcagcctcctaaagtgctgagattatagtcgtgagccactgctcagcctaaaaaggatcacctttaaaatgtgcttgccacgctgcatggaaagcgtccagtaagagcactacaagttgctgctgatggtaatcctggggtatcccggcctccgaggaggacaggtggtggtaaatgcctatgtggacacagtcccactgctgctgctcagtgccgggacccttggcaagccgcctgggctctctgacactcagccactctgcctgtgaaacaggatcttggtagtcaaggggttggagagatggaatggacggggcaggccaggcactcagcaagcgctccgtgaaagacgagagtgcggtaaagacaagcatacattcttggttaaggtaagaatgaaacatcttttctctctggtctgtgtggctcgcaggggacggaggcaatgacgtcagcatgattcaggaatctgactgcggcgtgggagtggaaggaaaggtgagagtgtttccctctgctcggctccacttgctgtagtttcttggttctttttccctcaaagacacagctttaagccttctggaaattccagataaagaatgataaaacataaggaatcatgtgtcacagttaccttgtgtcactgggaagatagaggtctgtattgctacatcttacagacagatgaatgttggctttttgtttgccacgacctgaatttaaaaaaagaaaaagtgtttctaggcccggtgtggtggctcacgcctgtaatcccagcactttgggaggctgaggtgggtggatcatcacttgaggtcaggagtttgaggccagcctggccaacttagagaaaccctgtctctactgaaaatacaaaaattagctgggcatggtggtgggtgcctgtaatcacagctacttgggaggctgagataggagaatcgcctgaacccgggaggcagaggttgcagtaagccgagattgcgccactgcactccagcctgggcaacagaacaagactctgtctcaaaaaaaaaaaaaaaaaaagtttctctatattcttagggtatggtaagtatacttcagacttctctgggacagtcagcgttgtcagtaaaagcattagttatcctgctctgtgctgatctcttgggcgctatggaagagtgtggcttagttcacttctcaccaaaaggccttggcaggtataatttttaaaagttggtgtgttaggaaatattttttctgtctttttctccttgccaattgtgcgcttgcctcttacagtttactcggccctaatttgtgacctctaaatgacaagaggcaagaagatgggtcaccgagtttgttaggactgtgtgtgaagggctggaagcggtggctcacgcctgtaatcccagcagtttgggaggctgaggcgggaggatcacttgagctcaggagttcgagaccagcctggcaaacatggtgaaaccccgtctctactaaaaatacaaaaattagtgagatgtggtggcacatgcctgtaatcccagctactcaggaggctgaggcaggagaatcacttgaacccaggaggtggaggttgcagtgaatcgagattgagccactgtactcttgcctaggtgaaagagcaaaactccatctcaaaaaaaaagaaaagaagtgtgtttgaagtataggagtgccaaggcccggagggggcagcagagatgctcccctgtccatcctgttgcatagcttcatgactttggctgacccatagggctttttttccccctctttaccaccctttctggttctctggttctcagcaagatgacgatgatttaaagttgtagagtgaaatgatttttgaatgagatatatcagaagtctgtatagattccctgaatacagtttttaagaagcatgtttttgagtttaatggcattctctaccagttcttaaaaaattaaagcattttcccttctattaaaaatggtattctggttcctttgtttcttgggatataaaatagtgctcactataaaaaattaaaagaatctaggccaggttcagtggctcacacctgtattcccagcacattgggaggccgaggtgggcagattacctgaggtcaggagttcaagaccagcctggccaacatggtgagaccccgtctctactaaaaatacaaaaattagccaggcatggcagtgggtgcctgtaattctagctactcgggaggctgaggcaggagaattgcttgaacccgggaggcagaggttgcagtgagcggagattgtgccactgcactctgggtgacagagtgagactgtctcaaaaatatatataacataaaataaaagaatctagaagtaaaacgcatcttttcttttaggtaactgcatcaaatgagtaacactggttattctctcaacattttttctgtgtgtatattactggttatgagtgtgtatatatttgctatctatacaaatatcttacacatgtatatatatgtaattttcatgtatttttttaaattgaaaacacactgtacattttgttgtgcagcttacttaaatctgctacatcatggatttgttcctacatgagagcatacagagccatcacttcttactctgactctacctttttattttgaaaaatgtcaaaagttgaaatacaacaatggaaaagttgaaatagaacagtgagcattcatctacccttcactttggccaattgttactatttgctacattatctttctttctttgaatcagtagaaagtaaattgtatgtaatgttacccctaaatatttcagctggatctctttagaacaaggacattctcccacacaaagaaagtaacatcataaccacgccccaccccccgccccgcccccccaggcacccccaccccatgtaacatcgatacaatgctactatataatattcatgctcaaccccgtgttaacattgatatataatggtactggataatattcatgctcaaattcccccatctgtcctctgagtgtcttcacagcttaagtaataaaagctccaggaaggattgcaaatcacatttattagcatgtcctcatgtttctgatcttctttattgtagaacacgtttctctctttttgtttggtttggttagcgggtgttttgtttttcatgtcagtgacatttttgaagcattcaggacagttgtagtgtctcacggcacacagttcttgaacccatcagattgattcggttccaattctggtttggcatgagcactgtacaaggggaattggtgttcttcctgttgtgtcgtatccagaggctctcatgtccctctgtccctttattgctggctgtcactgccttttaaaatgagagaattcggccaggtgcagctgctcatgcctggaatcccagcactttgggaggctgaggtgggcggatggcttgagctcaggagtttgagaccaaactcggcaacatggagaaaccccatctctaccaaaaataactaaattagtcaggtgtggtggtgcatgtctgtgctcccagctgctcaggaggctgaggtgggaggatggcttgaacctgggaggcagaagttgctgtaagccaagatcacaccactgtactccagcctgcgtgacagagtgggacccagtctcaagaaaaaataaaaattaaaaaatacaaaatgagagaattccattatatggttgcactgcaagttattcccacttctgtgagtgtgcagagctgtgtattcaggaatatcctatctaatattgttagtagctctgggtttttgcctcttgtttaattagctcttaagggaactgaatgttttaaaatatctatttttaaatgattctttgctacttatggggtgggctgaactcccaaagtattagatccacttgacgtccaaattataactatatgtgattcggaatggtttttatttaaataaattccccttttaaaatcaaatttagacttggaccaccaactgcatatagcttgaaaccaaagaatttctttcttgaagttcttcaaagatttcctacaatgtcttgctttttcagtgaaagaaaatgtgtttgccctgacctcttgtgcttctgatggtgcctaattttattggattttaggaaggaaaacaggcttcgttggctgcagacttctccatcactcaatttaagcatcttggccggttgcttatggtgcatggccggaacagctacaagcggtcagccgccctcagccagttcgtgattcacaggagcctctgtatcagcaccatgcaggtgagtggacagctggcccctctgcacatgtgcctgtggctataccatgtaggtgggtgggcagctgctccctctgcacatgtacatgtggctatgtaattatcatggaaaaagcctgggaattagattatgctttggagctgtcacccctacctcgccagtttaaatcccccacctggctgcattccagctgatagaccttgagccagtccctgaacttcttggtgctcaagattcctcccctgttaagcggtgctggtcattcctgccatgtggtgaggatgtgtgcgttagcagtggtgacatccagtgcctggcatggggcaagtggagtgtacatgagttattttaattgtgggtacgttgttataatttgtttgctggagtgaaagacgcagagttaaatgctgaatgactattcaggccctggtttttcaccttttgcagaggtaagggccatcagagaacaaccactaaagaagaatgtactttgcttgtgtgcctcctgtaccttaggcatcaggctaagtgttgacaatgcagtgtctcacataagcctcacaatagcctgagcccattttacggatggggaggctgaggctgaatatggatgagaaatttgtggtgtcccgcagggattcagtcagctcaggcaggtggacctcaaagcctgcagtcacaatctgagtaccttcttgatacactcgtcatggagggcctgggaccgtgtccacttgcaggggtcagcatgacacttggcactgagattgactcagcatcacggttctgtcttccagcagagcctagtaggggaactgagtttaattattatgatcacgaatacccttggaagttaacatcttgttcccatcttgctttttcataaaaggattctagagtatatattttctcaccttctctctcacaaacttcttcaaaatctgtcatcataggccaggcgcagtggctcatgcctgtaatcccagcacattgggaggccgaggtgggcagatcgcctcaggccaggagttcaagaccagtctggtgaacgtggtgaaatcctgtctctactaaaaatacaaaaattagctggacatggtggcatgcacctataatcccagctacttgggaggctaaggcacgagaatcacttgaatctgggaagtggaggttgcagtgagctgagattgcgccactgcactccagcctgggcaacagagtgagactccatctcaaaaacaacaacaacaaaatttgccatcagtctgtagcaattaagtgtggagtagaaaggaggccaaaggagggaaagaaaatatttttggtattaaaaagctattgattgtcaatcttcctttttgggcattgaggtgaaaatgctcccagttgagtggtgagaatgtaggtacagtagatcctggaactcacgtctccttctggccataccattaaggatctgtgagaccttgagcaaataactttactactctaggcctcggtcttcccacctggaaaacggggatgatgagaccctccttgccctcggacagggccactgtgaaaaacagagacgtttttaaggcatcagtgctaaggcatccttaccgtgattagtagaagtgaaataaggtaatatgtaaacatcaggtgatattttaatttgtgagaatgtttaatcatacttgaaaggcggtctgccttgtacaatgtatcaggtagtgctgctttgggtacatgagaattttccgtccactggctacaccccagttttttgggggtgattttatgttttaaatatctattgcaattgtgagtaggggagcctgaaagtgactttcatcaaaatgatctaaacccaaacagctgctgtggttcaccagaccacatctgtacttttatgttaactcaccaattgaacaggataatgctgtggctttaatgattgggagattaatcagcccgtccttggactcatacacaaaagctggccgggatgagctgacttcttcaaaaactggatgttactgttaacattgatgtagaaaaagaattccaggatgaggcattgttctttgtgctaaagaaaatgcctttaacccctgtccactgtgctgaaaatggccgagagcaagtcccagttagaattgcaccgggacatgagtctgtcagagaacacagtgtttttatttttcccaaagtgctcttgtcgagatgaagactttgtggttaggatgacccttttagaggaaggggctcctgatactggtctggaaaataaacaacagattcttgacatttttacaaccatccttcctaagcagcggcacagcctgggtgaaaagtcactggaaaagtggcttttccggcgcagccagggcgaactggggcttcctgtggccatggcgctcaggatcacctgcgctctgagctctgtgccgagaaagcacgtgtttcttacatgctttctctctgtgtccattgaaggtgctctggggagctagccctggtctgatgctatttctaatgactagggtatctctgccttgctttcttctgctttctaaaagctttcaggcagcatttgtctctggccttccttcagctttatatgaatggatatcagcttggagaccgtgtttcctctgttagcccatagaggtccagagatggagctaacagagcttcaagcctgattggatctccccagcctattcatcattaccagcagctaatattttccaaagcaggaagcagacatttccgcgagggtttgtaaatatcttcattgcttttgtctaattgcaaaaataatctgtcaccatgctcttttcaaaaatttccccaaataccgaaacatgtaatataagaagtgaagccttttctgccatcccagcccccgtagacacttcagaggctctttttctgtatgtgtttccatacctacggcactttggttagcagcgtgcatgcctacagaggtgaggattccgagctgtttagaagtgtggccacagagctgtggccacagctgggcttgagtcccatagggctgtttacctgctcagcctccccttctgtaaagtgtgggtgatagtagggcttgatcctgtgggctgctctggagatcagctgtgctcatgtacaaagcattcctgggtcctggaacttaataaatattcacaacaggctgagtagaccctggagctgtgatacatcaccctacccgggaatgattcctagatttgctgcttaggaactgtgtgggcttgggcaagccacgtaccctctctatgcctcactttctgctttgcataatgaggatgatgagaatcgtacctacttcatagggttgttgttgatgttgtgagaatgaaatgagcaaatccatgtaaagtaccttacagcagtgccggcgcgggtgttatgtaagtatcaggtgttatttttattctgtaaatgtaagggattttgtcatgacttttggtgacatcctcctctctccttggcacaggctgtcttttcctccgtgttttactttgcctccgtccctctctatcaaggattcctcatcattgggtaaggaaatcctgccaaggaattaattgtttacaaaaccttcttcaaatgctgcaacagagagaagaaacgtggtggaaaaattcttgggttcccaagccacattggattcccagccccagcgaatgcaggcccagcaccatggtttagaacctccttcaattaacaaggttttgagctgttaagcccttaaccagatggaggaagtggagttggagatgtgtgtggtgtgttgcactttgccatttgtacctggtcttgaaaaaatactccagagttatcagttgattgaggagagcaaggtggaaggtttgcagacttggtgatttcactggggtcttaataaaaaggggtgggggatctgaaaaatgccctcctggcctgaactgagcccagtagaagtcccatccttggagctccagggagggccagagtccactgcctcggggatgtgcaagtaacagagcttggctgctgtgccacagtgacagagatggtgtcacttgggcctttgcagcctgcaaacccacccccattactgacctggaacttcaggatgatccttctgaccttttcagagaatgtgctcagtctctgaatcacccaggtaggtggagtttggttaccgagtgccctagatacagacacatgcagctgaggccacttctggttatgaggagacggcgggtgcgggaaggtcagctgcgctctggagagtctcacagagtccgctttccatcctactgtgttggctgatgagttcagcctgagaggaggcactagaattctgcctgcttctaactggaaaagcgggctgtctttcgtcgggttctggaagagtacaagaacattacagaatatagtcaggggttccctgagctgtgcgccgtgcgaccttccgtggtctggtcccatctttcccgtgggtcctcatttcctcttccgtcgccctcagccccagccccactggccttatggctgttcttcagacatgacagccactcccgcctcagtgcctttgcactggtggttccttctccctggaatgctcttcctcctgggattggcttggctggccctcaccttttgtgggtgttcactcaaatgttctgttcctcagcctctaaaattgtaccatcaccccctacacacacacacacacacacacacacacacacgtcttatttcctctaccccattatatttttctctttagcacttctctaacacacatagagtttacctaatttatttgtttattgactcgctgaccgggatgaaagctcttcagggcagacatttttgtccatttttgctcatgggtttctggtgcttacagccagccccggagcataatagacaagcagtaaatatttgttagaggcatggttgggacttgggtgccggaggctggcacagcacatagctcctatcgcgtcagccaggtcttacctatggcggttttctctcccaggtactccacaatttacaccatgtttcctgtgttttctctggtcctggacaaagatgtcaaatcggaagttgccatgctgtatcctgagctctacaaggatcttctcaaggttctgttagcttttcagtccctccttcctcctttcctcctttgcttttcccttccttccctccctccctgctttttttctttgaatttatttcacacagaccctccaattctgatttgaacacacttgaactggtagcttttttacttttggggggaaggtgtgggagtttacattttttcttaaagcagtaatatattcactggtataaagaacgtgaaaaagtacagtaatagataaactgaaaacaagccaactcacgacttgcaaaaagcccctgacagttccgctttgcagttgcaacttaacgtttgctcccagagatgttcttgtgtacagttccaaaaagtgtgtgtggtggcgtgtgcctaggcaggtgtataattttatttgtcttcagggttttttacccaagggaaggtttattcccatgtaatgttaattttaatgttaattctttttttttttttttttgagactaattctcactttgtcacccacgctggagtgtagtggctcgatctcggctcactacaacatccacctcctgggttcaagcgattctcctgcttcagcctcccgagtagctgggattacaggcgtgcaccaccatgcctggctaatttttgtatttttagtaaagaggaggtttcaccatgttggccaggctggtctcaaactcctgacctcaagtgatccacttgcctcagccttccaaagtgctgggattacaggtgtgagccaccatgcctggccaattctttttttaaagaaataattcctccaatgtgttcagatgtgtgcgagccactttattgatgaagacagatgggttgccttatctcgttagcgggagaataacgtgaaagctgatggcatgctgcgtgagccccccgcgaaaccggctctaacctttctctgtctctcattcagggacggccgttgtcctacaagacattcttaatatgggttttgattagcatctatcaaggtaaggatgagtggagacacctgtttgtcttgtgctctggtactgactcagggtgtccccttcttgcctgtagaacaagaagagaagaaacgaatctgaaatagcaggaaggagggtggcagtgggacccaggggagaccctgctcaccctgtataaggacttgaacatcagacatgcacagtgctgctgtgtgagaaatgaggtagtgaagccagaggaaggcagtggacagtaatcaaagcctgtggggctgctccactcatgaggcaaaaagcagatgctttctgggatgttctgaaaccttttctgagagtcaggtcaagtcgtagttttggaaaaacatgtttacctcagtggcctccagaggggggtcttcccagactgtggaggcgttgtaagatgacctgttggaatataagaagaaaatagcaaaacttctgtttgtatttatttttcctaactcttttaaatttacatatatatatttatttatttatatatttttgagacacagggcaaagccaccatgcccagaatccttttttagtatttctatttttatgtatgttttgtagtgcacataatagattttatatacttataaaatatattttatataatatgtagaaacagagtgagaccctgggtggcggagggtctcactctgttgcccaggctggagttcagtggagcaatcacggctcgccgtagcctcgacctccccaggctcaggtgatccccctacctcagccttctgagtctgggaccacaggtgtacaccaccaccaaatcagtttccaaatcagttcatttcttcccaatggactgtgagccacgagtccctgcaggtccagcaagatgacctcatgctgtgctgtggatcctgtcgggtgctgacacaggctttaattcctgtctagaaacctgtttctagttcagcatcttagactacaggtgtacaccaccacacccggctaatttttgtattttttgtagagatgaggtctcaccatgttgtgcaggctgatctcaaactcctggactcaagcaattctcttgcctcagcctcacaaagtgttgggattacaggcatgagccactgtgcccggaatcctcactcttttttagtatttccatttttatgtatgttttgtagtacatataatatacatgtgaaatgatcctaatatttctatatatctggacaggtacacatatataacttacaaataaacatgtgtatttggggattattattattactattctgagatggagttttgctcttttgtccaggctggagtgcagtggcgccattttggctcactgcaacctccgccttatggtttcaagcgattctccggcctcagcctcccgaataactgggattacaggcgcccacctaattttagtatttttagtagaggcgggggtttcaccatgttggccaggctggtctcgaactcctgaccttgtgatccgcccaccttggcctcccaaagtgttgggattacaggcgtaagccaccgcgactggctggggtttattatttttttaaaaaataaatttactgttcatgtctcctattggggtttattcttttttttttttttgtaacagagtcttgctgtatcacccaggctggagtgcagtggcacgatctcggcttactgcaacttccacctcccaggtttaagaaattctcgtgcctcagcctcccgagtagctgggactacaggcatgcgcttccacgtccagctaatttttgtatttctagtagagacagggtttcgccatggtggctagtctggtcttgaactcctggcctccagtgatccgcccgcctcagcctcccaaagtgctgattacaggtgtgagtcacgacatcattttattttttatttttttgagacaggggctcactctgtcacccaggctggagtgcagtggtacaatctcagctcactgtaacctccatctcccaggctcaagtgatcctcccacctcagcctcctgagtagctgggactacaggtgcatgccaccatgcctggctaatttttgtattttttgtagagacgggctttcaccttgttgcccaagctggtctcagactcctgagctcaagcaatccacccaccttggcctcccaaattgtgggttttcaggcctgagcccccgcgcctggccgcgactccatcattttaaatattatatttaactttctatttctttcatcaactctagatactcccctccctgccttacttccttttttctccctttttctcactttgtagttaaagattatttatcctacaaggtcaaagaggaaaatcagaaaaccataggttcagacctgcataaagcaccagtcattaacctcatgtaacaagtgatgcctttcatgtctaaatgaaaactgcggaaaggagccaggtgtaggcgagcagcgcacggctttcgcagggagggtgaggggaatacccttctctggtgtttgcagggagcaccatcatgtacggggcgctgctgctgtttgagtcggagttcgtgcacatcgtggccatctccttcacctcgctgatcctcaccgagctgctcatggtggcgctgaccatccagacctggcactggctcatgacagtggcggagctgctcagcctggcctgctacatcgcctccctggtgttcttacacgagttcatcggtaagacccctgaatgcttaaaccccgtccgtcacccccagtgaatctggcccagaggtctcactgccgtatgaaggaaggggggttcccagcgctcggcctgggctcttcctccagcagtccttcccgctcagctgtccacgttttcttaacaggtgttctctagggacaggtggtagttgtgcctcagggtgtgaaattgaggacagagggcgtgattgcagtagacagtgtttttgtttttctttttgagtcggagtcttgctctgtcaccttttttgggccacaaaatctttttgttcccatgaaatcttaatctgaagtccaatctatgaaactgataaaaggggacttgtgatagcaaagtggcagtgctgggaggtgccgagccccagaaccttgcccgtgcagccctgccttgctgctgtgtcctgatagagctcctgagggactccagggatctcagaatacaatctgctgctcctcacagcaaaccaagtgctgaaggtactcgccagttccgtagacgtgggagcacctgccgtgtgccaggattatggtggcagatgaggtggacgggctcgccagggagctgcccttctcgttgggaacacacgataaacacacattaagtgagtgtgagcacaggaatatcagatgtgatcaaagttaccaagaaagaaaaatggggtgaggtgctagacgcccaggcacaccccaaataaaaaatgttatggaggccgggcacaatggctcacacctgtaatcccagcattttgggaggcagaggcgggtggatcacgaggtcaggagtttgagaccggtctggtcaacatggtgaaaccccatctctactaaaaatacaaaaatcagcagggcgtggtggcacacacctgtagtcccagctacttgggtggctgaggcagaagaatcgcctgaacccgggaggcgaaggttgcagtgagctgagatcacgccactgcactctagcctgggcgacagagtaagactccatttctaaataaataaataaataaataaataataaaaaatgttatgggaatgtagagatgggggagtgtcagcaccatcctaatgtggggtggtggcagatttctctgacctcagtagtgattccaggtactcttgggcttgtccagcgtcagccactgtctctagatggacaagcctggtttcatcactcttccatgctgacctcacttgctttgccatatcagttaatttcttcccaattgattgagccacaagtccctgcagggccaccaagatgaccccatgctatgctacggaccccatcgggtgctgacacgggctttaattcctgtctagaaacctgtttctagttcaactagaacttgcaacacgggcacggttcagatgatccagcattttctgtgttgtgctgtggatagattctgaactctaatcttggtttcccccgcacggggcaaactcaagccgctatggctttggaacctcagggccaggggtcatcctgaaagtctagctggtttagcagacagtcctctttacacctctttcctcctcagtaggagcatttaattttctgtctgtgttattcaaacaaaaaaccctcaagagtgatactgtttctcctttatcagctgggggagcagggcccggaggctgcttctctgctaagaagctcatgtgtgttcaggattgcaggatagactctctctgggggaaactttcagttaatgacaaccccctcacgccccatcctccgtgggaaacctgcagggcccaggctctctagcaatggcccatcccttgctcctttacctcaggccttctcagtgggggtggtgtggaccccaccgcctggggaacaaacagtggtctttggtggggtgtgaacaaaccctaaccttttacgtataaaggagatgtatatataatattataaacagatacacagtatacctgtgacattaacatgtcatggaggtggtcaattaggagaagaagaaaagtctaaaaatgttccttaaggggcaataacaacaaaaaggcagagaaactcgaccttaccctggaagcatctttgatcgcggctcttttgccagcttccaaagctccttaggaaggttttagtaaaggtaaaagaaacatcccctgaaaagtaaaggtttcacagttgcagccccagtttctagaaaggatttgtgagcatttactgtgcgctccaggaactaaaggagcatccctgtgaacagtggagttttaaagcagtttcacccttgtcactagtctctagaaagcgttttgtgagacctagtatgtgctcaaaggcttgggcctgaggtggtcacagagatgtggcccctgctcaggaagctcagcttgtttgtgatagggacacaccacaggaccgggtcagaggtgtaggaaaaccacagggtgagttgagccttgggcctggcacttagtaggtgctgcctcagtggcagctgcatttcagcatcctgtgctcagaaagtggagaaggggcttattctggcttctgctatattgaaagccacaaactgtcactcctctcttaagaaaacctcataaccgggtttataatcctgcagcaggaaaggcagtacgcccgccccccccaccttccatcagagtccctgagggtcagcttaagcctttctctgacaagggggtctgaacactttgcaccatgacccagactcatcctgtggctttctgcgaccatcactggaagcagagggtgcatttgaatgtcattttctgctcgccagtggccgggacttagaaagactctccaactgttagacaacaccaaatcaaaagcatctctgagttttcttcccctgtaattttctttccttctttttttctcttttttttgagacagtgtcttattctgttgcccagggtggagtgcggtggtgcaatgttggctcactgcagtctcaagctccccgggctcagatgatcctcccacctcagcctcctgaacagctgggactataggcatgtaccaccatgcctggctagtttttgtattttttgtagagacagggttttgctgtgttgcccaagctggtctcaaactcctgggttcaattcttctgcccgccttggcctcccagagtgctgggattaaggcatgagccactgcatctggtggcccccatagttttcttctcctgggtgttaaaagtagcatttcactgtcaggaagctacagaagagagagcgaggaaaatcaagctgcggcgctgtgtgctcttagccatggtaccttcccttacagtccatggagaaagagggccaatgccaggaggctgtgggtttgtgacgggagatgactttccctttgatagttgtgacgcctgtttctggaccccatgcaccttccggaatattcctgcctgctcactgccgtcttcccctttccttgcagatgtgtacttcatcgccaccttgtcattcttgtggaaagtctccgtcatcactctggtcagctgcctccccctctatgtcctcaagtacctgcgaagacggttctctccccccagctactcaaagctcacatcataggccgtgcgttcgctggagggggccctggtcttggcgcttccctgatggacagagctcaagttccatttatattaaccgccacctgtggattttgcagtaattgctaacacatgcagttttaatgggaagtggctctgcgcctaaacggagtcctaacgctgcatcaacgggagggagggtcctgaaagagacccatctgggcctgtctgaacccctcgttcttcatgtttaggtgaatatgaatatgttaaagctggtggctcagctgggagatttatatgggtcactgtgcgagcttccttatgacttgaattttgttgtcacatgataaaagtttctgtgtagctgaaggttgtagaaggcttgtgtgtgtgtgtgtgtgtgtgtgtgtgtgtgtgtgtgtttttaaagagtcctaatgtgtatgtactctttatgtctttcttgctcttacaaagaggtgtcagaaaaatagaaagctcttggtgtcggtttgggaggaaaagacagtgacatttggtaaaaagttatccacacaataatctccattcggaaatgctcagtatcgtctccagccagccctgcttatccaggttacactggattcctgggatcgtaaccagtaaatgagaggagagggagagagagtgtcctaagtccaatctgttatccttgatctgattcagcatccatagtgtgtgagttaacttcacctgccacctcgtaaaagaatttcagaggtgtgatcccgctttattgggacctggtaacaatcacaaagccagtggctgtttgagaaggacctcagacattttcagcagagttgttttagcaggaaacgtgccactgaatggcccctaaatgtgtcgacagtgtgataagagactcaactaattctttaggcaacatggcagatgtgactcagatcctccaagaccaaagcggaaaggtcagggggctgggactcttctcttccatagaagcctgtttcctgttaggaggcataatggaagatgaccccacaaaggcagaggcatctttcggaacaacactggtggcagctttcagaacaaggaacccctggtgggaggacgcccaagctacagcgttgggatctgggatctgttccactgccggcagatttcaaggggaacttgctgaaaggcagccagtggtgaagatttctcccctcccaggatggactacatgccggcatgtttcttataaagctgtggctgcttgtttcagaggaagggagtttgcagtcgcgggacgtggtagagcaaggcattcttgggttttcaagttgcttcttgcagaagccacatatgcatgccataagggttaagttggtggatctttaagagccaagtgtggttgagatcttggatttgcgtttacttcttgatgaatacatatccttcaaaccctctgcctggcgctacttctgtgtgcttcagagatgtacatcacagcctggtttctgatgcctactaactcctgctcttggagagctggagacacgaggatcagatagtcccttgcctttggagcactcttgataagcttttgtattttgtgttgtccttttaaaatgttctagaatgactttacgttgcaggtactggttaattggctgttgacaccacatctattttgtcttatgattctgcagttttgcagtacttttctctatctgattcagccatttctgccagagggaaaaggtcggcagaaaagatgtattgagtgaatagttaaggataggatctttgtccaaaaatttcagaaagattgagcaaatctgacgtattcattgagtgagtttctgtgttttcaaaggtggaggagaaatttgtgctggaagtttttaagcctccgttttcttggaaatcagtctgtaacactggcaagtcttaagatagtcccatttagactttgcagatgctgaacctggctctgtaacgctgggaagtcttaagatagtcctgtttagactttgcaaaccctgtacctggctttgctcggagattcgggatgctggctcctgcaggcagggcgtgtgggagcctcgtcagaaagttttagaggtttccagcagaagcagaatgaagatggtctccctggccttttccttaattctcaattttgattgaggtgcacaagttgacttttaaagccaacgcttaagatactgattgacatcttcaagggagaatgctcccaggaggggctgaagaagccatagttggaagtggaaggtactcgtcagtgttctccacaaacctttttactctgttgtctcagccgcactggggcggaggcggtcaagggtgagaagtaccgacactcaagtgcaaactgccacgtcgttggcccatcccatcagtgggcagctggctgacgccattcactggacggtccctgaacacctaggaatgcacacaccgtgcttctcagacactggagacgcaaaggcaggaggatgcagtccggtgagaggacacgatctttacctgcacaatcagactgtaagcccagcagagaaccccaggggcgcctgggtacttctcggaggtcatcttagttgtggtggggaagacaaagaaataagcaaacaagaaactagagttactatacaagaaactctcctgagtttgtaaaccttaagcataaggattcagttgacctttttcttggttcatcaatctggaaagaacttacataaagcgccattgacactgtcacctgggagctccatgggccgtaagtctttgacagccaatttaatttgaggtcagagggccttgaggtacacagtcagcactgtttgaacacttttcctgaaagcaaaactcacagctccctgcgccctctgacaacactagctatttctgccagagtaagaacttctattactattttattattgttcatatgtcttttgatgatggttgtgtgacagggggaagcaggatctatttggtttcttcccctccccccaccccttcctttttgtctctctttttttttctctaagaaaatcaccagactagtttttccatcttgagtaatttcttatgtgggacagttttgatcctcattttgaaagcatgcgtgtgcacatgtgtgttgcctgtggtgccaggtgagacaggtggcactaactccagctgcttggaaggcatcccaagggcgcatcttaaagttggagcagacctcccttttccagcccctggggccattagaccacgtgctggaactagcattgtaaaattcccatcccagttccactcccctgaagtgaaacccttttttttttgtgacagtaaatcttaaaaatcattgtctctttatgaacatttcctcagtttcttctctgctgaaaatgtaagccatgctactttttaatgtattttgaattttgtgctcattggaaattgatatgctaatgcctcccccaccccccgccagacttttctttttatactttgtcttgtttttactggggtaggctgggcatgcgtgcgtgcctttagggcagcattttaaacctttgccaaaattgcaaatgggacatgtacattcttctgctccatcctacttaaacacctatcagctatttttatctttaaccttttctgtatgtttgaagtgtgtggggggtgtgtgtgtgtgtgaaagagcgagagaatgatgtcatctaaagttttttgaagaattatttggttttcattgcattaaaattctatcactcccagctttgttttcatttaaaaaaatatacaaagagctttgtaaatacaacacattttatttctcccccttcttttaatgtacagcttttttgccacttatatatacttaaaatattcccatgaattatgtccagttcttcttggaaaaaaatttggttttgaatgaacctgcaaagcatcctgcagcgtgagcagctcctccacctggagctccgaagcatcttctcaggccaaagcggcattacccgtgaatctgtcttctccgccacagcatggtttgaggcgcagtctgttaatatagctgggccatgtcagtgactgttgtgtttgtggggtcaggtggggggcatggtatttgcaaaaaaaacaaattatggctaatttattattttgttgcagtggggttaactgtaaactcatgtaagagtctgtgatttcctcattggttgatctctctctctgtaatcctcattgcaaattttcaccaggacagcgttttttgattagaggggagctctggcacagtatgctttaatttagcaggaacttccagatgatttaaattctcgatgctgtgatgacacacatatgatctttcgtgtttctgagcgactctactttcattgtttgccagcgtggctcgttgctgttgcccaataaagcttgtgtacgttctgccttgggggattattttaatttgtacagaaacatgaattctggtatcaaaatgaggactttttattataacgctcctattttttctttatttcatggtacatgaaatgtaaagaaaactctttccagttcagaaaattattttgattttggcaaaaaaaaccccaaatcaatgcatgttatttattattttgtactattgtccatcccagacgtgtcagaatttcaaaaggtgatagatataaatggaaaataagatgaaa

SEQ ID NO: 861 - DNA, 573 bp, Homo sapiens
atttgctaaagtctagagacattctggttgtcaccatggagggtgtatgactggcatctagtgcgtaggggccagggatgctgctcaacattgtacagtgcacaggaggggccctgcagagcaaagagttatctggccccaaatgttcacagtgacgaggttgagactccctgttctagtccttatcttccctattctttcagtggaccacagtttgatgatatctgcagtcccaagtgtaaatctaaaatcatagcatgtgagtctattccagttgaaatagtaataactttcaaaacaaaggtcttaaatccatttgatctttctttcatcattgaaaatcttccaagtgctttgagttttccttttactttctgtagcctttgcccctaaatgaggccccttctcgcttttcatcttcagccaactgaaaaaacattggtgtctgttaagtgcactttgtacactgtctgtcatgggaagcgggctttgccgctgaaagagggtgttcctttcagtttctcattccttccggcctccctctctaggatgaatcaactggagaaattacgt

SEQ ID NO: 862 - DNA, 498 bp, Homo sapiens
atttgtctgtctgtatttgtaaaagggcccggaggtataagctcgtgtgtctcaggaagcaagttatgcctccgcctactataccaaatactataccaaatggtgtaattagtggctgtctgcagtgtgagctgctggttccctctttttggttctcaatggaaagggccatcctcagtatatagattagaaagataattgtaacttagttgtgttatctcatgacagcagcaaaaggaaggtatgtggtttcaaaggtagggaccgaccatgctttcccttaaacgtgtgctatccctgcacgaccttaagcctctgcatttgcctgcagtgaacttccgtccatgtgcggacactcctccgccggagccgctagggggaacttgaggactgaaagacattgctgtttcctgttttccacaaccagccggaccccacgtgcccaactgccctgagtttcaagactgtgctttcatagcttcagaatttatttcatgg

SEQ ID NO: 863 - DNA, 935 bp, Homo sapiens
cagcatgaatgctcggcaggcagctcccaagaccacccgcccccaggtgcagccacctacaccccggggaagggggaagagcaggagctccactatgcctccctcagcttccagggcctgaggctctgggagcctgcggaccaggaggcccccagcaccaccgagtactcggagatcaagatccacacaggacagcccctgaggggcccaggctttgggcttcaattggagagggagatgtcagggatggttccaaagtgaagaggtctccatggcaacaggacaccagcaagtgtgtgggagtcgcactggtgtgacggccagaactggactcagatttcagccccatccccaatgaagagcttgagtttgaagattatactttttttgagacagggtctgactctgtcctccaggccagagtccagtggtgcaatctcagctcactgtagcctcaacctgccaggttgaagtgagcctcccatttcagcctcccaagtagctgggactacaattgtgagccaccatgccaggctcattgttatatttttagtagagacagggttttgccatgtttccctggctggtctcagactcctgggctcaagcaatctgcccgcctctgcctcccaaagtgctgggattacagacgtgagccaccacagctggctgaagattatactttcaattcagagcgagtttgaagatgacactttgaggcatcgtgtctatggttcattactacagaagcttctctggatgtgtaaagcacaggaaaccaggcagaggaggcacagggtgctctccagaacgagaagccagctcctggagttgtttgctgcaactgccattccccgttgatgaccatgctcttccttcagaagagggagagtgagaggaccaagtccaagtggttcccatttgaacatttaaaa

SEQ ID NO: 864 - DNA, 934 bp, Homo sapiens
cagcatgaatgctcggcaggcagctcccaagaccacccgcccccaggtgcagccacctacaccccggggaagggggaagagcaggagctccactatgcctccctcagcttccagggcctgaggctctgggagctgcggaccaggaggcccccagcaccaccgagtactcggagatcaagatccacacaggacagcccctgaggggcccaggctttgggcttcaattggagagggagatgtcagggatggttccaaagtgaagaggtctccatggcaacaggacaccagcaagtgtgtgggagtcgcactggtgtgacggccagaactggactcagatttcagccccatccccaatgaagagcttgagtttgaagattatactttttttgagacagggtctgactctgtcctccaggccagagtccagtggtgcaatctcagctcactgtagcctcaacctgccaggttgaagtgagcctcccatttcagcctcccaagtagctgggactacaattgtgagccaccatgccaggctcattgttatatttttagtagagacagggttttgccatgtttccctggctggtctcagactcctgggctcaagcaatctgcccgcctctgcctcccaaagtgctgggattacagacgtgagccaccacagctggctgaagattatactttcaattcagagcgagtttgaagatgacactttgaggcatcgtgtctatggttcattactacagaagcttctctggatgtgtaaagcacaggaaaccaggcagaggaggcacagggtgctctccagaacgagaagccagctcctggagttgtttgctgcaactgccattccccgttgatgaccatgctcttccttcagaagagggagagtgagaggaccaagtccaagtggttcccatttgaacatttaaaa

SEQ ID NO: 865 - DNA, 101 bp, Homo sapiens
gcttgaacccaagaggcagaggttgcagtgagccgagattgcaccactgcactccagcctgggcaacagagtgaggctctatctcaaaaataaataaataa

SEQ ID NO: 866 - DNA, 429 bp, Homo sapiens
cctcaggtccaggagctgaagtgagcatcactcagttgacagaaagcatctagaatgtgtcagcgaaaggcactggaattatcattccttcttgagaaggaaagaagaagaaagaagaaggaggaggaggagcaggaggaagaggagcaggaggagcaggacaaggaggaggaagtcttcttcccttgaggaattcttagtctcctgggaaagatagctctttatactgataatatgccacattttcttatgggtcttgatggacatgcacaaagtttaaaaatatcacaaaaaggagagatgattgagagtagctgatagagggtgaaagcagactttacagggtactggatgccgtaatagagctgtgagcactaaactggaatgtgccaaacacaagagagaatcgtggtgcccttcctggtagag

SEQ ID NO: 867 - DNA, 429 bp, Homo sapiens; identical to SEQ ID NO: 866

SEQ ID NO: 868 - DNA, 429 bp, Homo sapiens; identical to SEQ ID NO: 866

SEQ ID NO: 869 - DNA, 487 bp, Homo sapiens
gagactcatgcaggtttgacgctgagcagcaccatgtggttgggcctggcaggcactcgaggctttaggtcttggtttgaatccagactagaaaatcattacttattaaaagccttgaggatatgggtctaggaaagtctatgtgaagagataatagtttggaaaaagttttgcagaactaaagaaaagtttccacagttccttttctgtcctaatgtagagcatctttgttaactaggtcttggatcaatccaagctgtgtctgagaataaccatttataatttctcactggccagcactaacaccctttagaaaaggaactcaaagcagccctagcagccagagtcatgcgatcatggtgggagtacagctcctcaccaaggtcagctcctcagtgaaatccatgccttctggaggactgcttgtaaataaatattaagcacaaccattaaaaaataatttggctgtgaccatcaaatagtgaaa

SEQ ID NO: 870 - DNA, 7458 bp, Homo sapiens
agaccaagccctgagacacagtgttgagagccaagacataaagttgtgaagattcagacccagagcccagcagggcacaggctggaggggtgatgtgagtgatcagtaacaccatgaagactctgctcctgggtcaggaatgcttttttgtccctgtttttggattttccaccatgatcaggtatgtttgctcacctcagctgggagcctgagtgggagttgggggactatggatgttctctgccactgactggaggggagcacagccaagaatcatgagcacttttgccttcatgactgtattttcttatggttagaaacaaaactaaacaatttaaataactctgcttaatggaagtcaggaaagagaaaaggcagctatgaagtgttgttgttacagactgtgcatggaccctaatggtcacctaaatgtgagaggaggctaggcactgagaatgccatgtgcaaggaaataataaaagcaagtcctccaagaacatttcccacagactcaaatattttcgaagtaacaaaaataagaagagtgccctttttgagtcacaaaattggcatgaagtgaactggttctatgcttgctgtaattggtggtcaaggaggcaggggggaagccattgaatgtgttcagtgagctagaaaggtaactttctttcctggaagaaaatgatcaagggtgagaagtcaggaggaaagagatgtttttgaccaggtctcattcttctccctctgtgtctgaccttgaaaaggagagattgcagaataggaaaaaaaaaaaaaagtttgaaccttcccaagagatgggtaaacagctctccttcagaagaggatgagctgtcaaggatactggctgtgtgacatctcacaaaggtagaaacactattaggccatcactgggattttagtttacaggactctattctccttccctcaaaactttgacaagatgcaacttctttcctgagctaaactgttgtgttggttgtagtatcttgtcttatgcctcattactcactatcagagctcagtgatgaaatgatagaaaacttgagtcagtgatggggactacttgagactgaacgggcaacaaaatgaaaccttcagaagccttctggaaagagggacaggagaggaagcagtggaggaaatttcatgcagggctcctggaggtgccataaacaggataaagatctgggacttgtctgtaatcaaaaagcacaggggataactcaaaagtgctcaaggaggggaaagaaagcagacttggtcttcttgcagtagcactggctggtaatggttgaaatgtgaatgatcacattctagttaggcacatttcttcaactttcattccatattgtgttgtaccttatatatctgaaaaatttaatatgaaaatgaaattgctttttgattttttttattttaaagagcataatcaactgtgttcctgcttcctccagtttctcctaatgaaggaaagcctgtctgcagacctctgtacttgtagctgatacctgtgtatacacagtggggtacattataatttcagagttagtgcactttcataaattatttaacaaataatcagcctccataagattggtcttgaatatccatacctgttaagtgatggcaactctcaaaccctaggaataacaaatacccactcagttcatcaagaaataattaatgtaagtttgggagcagagagatgtgtgggctcaaatcccagttgcagagaaaccaccgtgtcacctgtaacctctgagagcttagttttcccattcatattaactataatttctaagaagctatactgttgtaggaattacatatgatgtatgctaagtgctagcacagtgacatacagagctttggagcctcagttaatgctcattactgtcattacagcataccatgagaccattcctatttttagaaatataggtactagatacatgggggatcttaaatctagttgttttaaagtcccattggtcatctaaatataaagtcatagcattcttgaaagtggttttcagaaataccaagaactacaagatttctacttaaactagaaatagttttggtctcacataaggtgaccaactggggctcccaaggtgaggtccccggaccagaagcattagctttacctggaagtttaggaatgcaaatccgtgtctcccagcccagacctaatgagtcacaaactctggctggagcacgaagtatgtgtttgaataaattctccaggtgattttgatgcacgcagcatgctaacatttaagaaatcctggtctataatgtttcacttatgccaaactaagacattttacagaggggaaaagaaaaaaaaaagcaataagcctgtttcaatttctctaggacacatgcgtcagtacttttatagctgatagtctgtccccatcactaaaatgactcaagttttctatcatttcatcactgagctctgacagtgagtaataaggcataagataaaatgctacaaccaacacaacagattagctcagcaaggaagttccatcttgtcaaagttttgaggaaacgagttttgaggaaaggagaatagagtcctgtaaaccaaaacgcctaatagtgatggcctaatagcgttcctacctttgtgagatggctcacagtcagtatccccaatagggactagagtaggaagtatatgggtagggtcagataatatttctgaaaggaaacacccaggagtatcccaagttaatgacattttagaccctccaacaaccacacaagtcagctccttggaaagactctggttacttttacaaagcaaaccaggagaattttcataatacctgataactatgtaagacttggaatatttgaatttctaggacatgggattgtgcaaccattcattttatcccataatattgaaatctccctcagataagcctctcggcacctaatagagttttcttagtgaagggctacctttctgtgggtaacagggaagggcaaaataaacaaccaaataatatcataatcacgagtgtcaatgattgctggaacaggtgggggttggtcattaaattctagttgtttccactattccagtaggagttgtgtgaatgttagcaaaagaccagggtgttacgatctgactgtgtttcatcaattgccttgacttttggatgaaatgcgatttgaggacatatcattattagatttgccacagattccaatttttttctctaatatgaggctaaccatgatgtcctttcccaggaaggacaatctctcctttatcagggaaaaatcagtaggggcttcctcaattttctccttcatccccaccacagagtcatagaggtcaagtccttttcttgtgaaacctaaaaaatgcaaattccaaggttgctgctatggtgtactaattttgtcacagtgacatgccctgtcacagggcgtatgtgttctgttatacagttgaaatattggttatactattgaaatgtttttgtactattgaaatcccaaataaacttaattctaaaagaagcatgacctcaacagcctcacacctacttatatcttgtagttctttctgtctaatgctggcaatctaagcatgttccaggcaagcaacattcaatagcgttttactgctccaataagttggttcaattagcaatgtcaaaggcagtcactaaatagatagtgtataaccttcatacaatctcgtattattttccactaattactatagaaaaatcgatgaagtttcattacaatggaataacttcaatcacacttcaaaaactacatacggaagatagccacaacttgctgctctcaaaaaacacagagatggcatctttactttgtttcaaatccccaaccctggtggcggtccaaagttatggcagttataaccccttatgtcattataaggaggaagggtaaatattaagtcaacatcctttaaagctaagagtatgactacagtggggtggaatttgggacttcatgcccactccctgtttctgttctattttacctttcctgacctctaagccaacaggagagggggaagggccacacttttgtgacccttgttaaagaattgtgagtttaggaaacaaagatggacttctgagggggtagttgaggatgggctgaaggcacagaagaaaccagctggtgtgcccctctccccactagcagacccttcttcctcattggttcagggcaaacaatcccccaaaaattcaagaaaactaacttagagttattttctgttatttctcttttccttgatctggagccaatgcagaaagaaatctaaaggtgaaggaaaggcagcgttcagcactgagcaagtccatgttggagaaaggtaatatcatcattgcctatacccaagagaagggaccaagatgccctggatgatgctcagcatcacctgggactatgactgtcccctgtcatcattagcattgctgagctcaagctttgagccaggaattaggccaaaatctccatggatctgtctaacttagcctttgcctccatgacagcttgttacatcccgaggtagaatctttgtaaaccctgtgttcaaagggccctgttaaggcacatcttctgccttggaccagaaaattgcttaagcacagagcctaaaggcagagctgccatgatctgctcatggggattgactacttattgaaggcaatgtcacacacctgtttgtcattttcacttccaaatgaagagtcatgctgcacatcagtgagaaatgttcagctctcacctgtcagctgtttgtttgtttttgctctctttctatgtgagaagacatttaatcatggacctattgggcaagcaacattgtgtggcctctgaaggctgagcttttagttctcatcagaacaaatgtaaaataattgaataacgaaatctgaaagattgttgtttcaagtctaaaaatattttatccctttcttaccttctctaaatagtattgtacattgaaggcaaaataataacttcagatactaaaaagtttaacattgtttacatgttcaaatttctattttgtagttcctttaaagggcctaattactacaaccaaatcatacaattaaaaagtttttatgctgctgaaataatcacatcagatgtattgcttccaataggataaatattctcaaagattcaagctatgaagaccaaatctacagaagatagcaactcagtaagacttatttatacaagtttagttttattgccaatatccatgagatattttaaaatcaacttaaatatttgtaataaaggattacagactaggaaatatatttctttaataaaaataactcacgaaagttgaattgtgactaagaggaagagaaaagaaggaaataaactaacaattgttaaatacttattaggtgcagagatttatatactttacatcatttaactgttaaaagagtcctgtgaagtgggtgttatgactatgctttgaagtggagggaattgaagctcagagaatttgagtaactgaaccaaagtcatatagctagtaagtgaagaactaggattcaaatctagatctgtatgcttccaaaattcactctcactctttgtatgagaggccaattaaaaaccccctacgtccctctgaatttgaactcaattgagaaataaaacagagagatgcagatcaaagcactcattttctcactaataaaaatgactggaaaatgtggctttcgatgtgtgactaatttgcttgctgtagttcacagggaattggaaatccttgtcttcgtggttcctggctcagcaggacccctgtggggcctctccctctcttgggaaagagattgctctagaaggtttactacaccagtgaggagaagatgagcgcaagggggattggccggctgagggcgaaatcaagactggagccaagtgcgctgagctctcacatgaggtcctttgctcctgttccctggaggcataagtggctggggtagagagaagcaggggtatttcttctgtcctttcttgcttagggattgggggtggaaatctccccgcatctaaggaaatttgaaaagacaaactatggctgcttcttcaagcaaaccacctcaccacactatccaggggataaaacccgcttgctgctgctaaattatgccaagagagaacattctgatatttctcctcaattctaggcatgacagcgtgacttggtgcttaaaggcatggagttttgagttgcagacctaggtttgagtgctgaatctactagcttcagggtgttaaaaaagtttcttaatctctctaaaccttatttttctcaaagataaaaaactgggtgtagttgtgagtatagtgaatgcacatagtatgtgcctttggcatgttaattcactattattctggacataatttctcctaagaaaaaggatgaactaattgcagggcctagcctaagctctgagaagtcattcgttatagcatttcagtccatagtaaacaagaagaaatgaggtaaagagtttaaaccagggaaggcatagctgtggtcaccaaacaacctgttaaaggcgagctgtaggcaccaaaaaacctattatggactgaattgggttcctcaaattcatatgttgaagtgctaaccccaagtaccaaatgtgactgcatttggggatagggtccctgaagaagtcactcagctggaaggagtcatattggattagggtgttgggaattgggctggcccagggagaaatcaaggctggaaccaagtgctgaacttctcacataaagtcctttgctcctgttccctggcaccctaatccaatatgaactggcatctttatatgaagaggaagaggccccagaggggtacacacgcagagaaaaggccatgtgtggacacagtaagatgacggacatctgtaagccaaggagggaaccttcagaagaaaccagccttgcctgcaccttgatcttggaggtccagtctccagaactgtgaaaaaaatgaactggtgttgtttaaatcccccagtcgtggtattttgtcatggtggccctagaagacaatatacaacccaaaggaatattctttccactttctccctcttccactttatagttttttctccttcgtttctttctttttctcttttactttccttttcttctcttctctttcctctggtttttaattttaattttaatttttggccttcctatacctccatttgcctctccaggaagctgaattccagacaattaatcattcatctcatcagttcagcaaagcaaatgccctcaatggtttcttttgtgattcgattattatgggatcagaatgtatcttattcctctgggaaaaatgaaacataaaaatttcagaaataa

SEQ ID NO: 871 - DNA, 786 bp, Homo sapiens
tttgtgaatcttggcttcaaggaccaggtgtacctgtatctcaggtgggaagattgaggctggagcaatgcctttataggaccatcagagaactcttctgtgaacagatttctgttgtgcatgatgtaccttttacatcatgcagggcattgtagcagatataggagttatgctttatttggtccccagcttcaggtgactaacagtccaatcagaatccatgcacacagagatcagcatgacacaacatgagaaaagaaatgttatgtggggaagtgtagcaaatggaacggccaggtgagaggccagagagatctaagaatgtcctgaaggaggtgagatttgcccttgaccttgatggagtggtcagacttgggaaagaagatgaataaagcctatataaactgagagttaagagtgaagactggagacagatggctttggcttaaatcgcagttctgctgcttgctatctgtgtgaccttgggtaagttacttaacctcagtttcccagttatgacatgggaatgataacaatggtgtcggtctcttgggttgctttgaggttatttgaaataatacctgtaaagcccacagctaaaaaggaggaatgatggtggtgatgcagggagaccaaagagtgaaacagtctagagtgaagcgaatgtgttaaaatccagaggcgatcaagtgaagccagcctttggaggcccgtagaagtcatttggaggaatttggacttcgtgcagtaggaaagagggaaaactgtttttagaaaaaaaaaaaa

SEQ ID NO: 872 - DNA, 389 bp, Homo sapiens
tcatgtttgggcaggtggacgtgttcaggctgccaagtgttcattttatggtctctaaaatggtgtgctaatgtttcaaggacagctctgaaacagctagggtaaagtggaggagagcggggagcagtccagcctcgactagaactctaagtggcatgtcgaggggctgctctcagaagaaaacagcttctttggtctgtgcattccttttgggaccaggtaaatattgtttaagatgagtttgggaatttccaggttgcctgagacactgtctgagaaccttcttagtacttggttctgacagcaagtgctgaagcggaaaaaatatttccatccatctgcactaatctcttgtttctctagcagttagaaagtggggaggggaaatg

SEQ ID NO: 873 - DNA, 3110 bp, Homo sapiens
tttttttttttttttttttgccctgaaacgaataaaacaaataggcgtctggtatttgttttgtataacacaatccccataaaatgaagagtaataaaacataattatctgtaaaggcttgttttataagcctgagaatgggcttgtttctaccaggtttttatgttcattcataggagaaagaatctctttgtacattaatatgtaacaacaataagaacaaatgcttcccaattacatgcatgaatcaaacttatcttttattaaaaaattttttttctgttgtagtaaaagtttgtcattaaattctttctgtgtaaacacattagattgaaggaaaatgttttccttcaatattctgttcaactggcataactttatgatttttttctccccagcataattaaagaaacaactttatggttggttattgacttttttaggtcagagagcactctgtggattctaaaaccgccttccagaaaagtacacatcaaacttctacgtacgtttttatagggtttgtagagctctgatccttggttaaagatccctgacaatgtctaatagctgttttgaaaactgtacctccaatctgaagctaaggttttagttttagttttagtatgtgaatatctgatgaaacgattcaatggttttgtagcattggattcaatttcagggttgggctcctttctaggaatagaggaatattcttatctcaggaaaaaaaattcagagtgtgggaagtacgaaaattattaattcaaaggtgtatttgctgtcagattggatggcagtacccacatccctaggggctcctgttcccaagactgttttcattgtttctatccagcgctgggcacgagccttgaagtggcgaattcatcctctgaagttgtgtgtccattgctgcaagaataaaagaagcagtaacagaatcatgcagcgcagtatttcatggtgacagttttatgtggttgtgtgatgttgcagagtcttgtaggtgatatctacccttttcttttgaatcaaaacacggggttttactggaggagggaagtttcagaaacaacctagtctaacacaaaattaagctcctaaatagttatcccattctgtctactacaaaactaattgcttacaggaagtagaagtacacatatctaatatttatatcctgtttgagtagtggtttctaattttagatttctaacccctttttacattatctttttgcattgaaattatactgaaacattcatattattatgaatgcaagctgaattaaatagaccaagattctcggtttctcccttcatgttgtcatctactagagaatgaacagcttaaaataagtgcatcagttcctcatccaaagggaagctgaatattccaattcaagatcactttgcgtgcttactggaaataccatttttgaacgtacttggcaacttaaagtgcccaattaaaagctctgttgaaagaggaagtctgtggatgtgcaattagtccttaggattcagagcatttcctttatgtgtggaaggccataatatgaaatcactggtcacaatagctttatgccaggtgcttagactagaaggcattttcaggatggattatttctgtactcttgctcctaaaatggtttacctaaagaggctcccaagtccataaaaatactggtgatgtcaagaaattttggaggtggcctttcacaaattttaggcagtcaataaatataactagccatgtacgtgataggcaatacacaagacttgcttatattcctagactttctattttatctgattgacagtgttcctcttcccacctttttattcatttatttatttttaaaagatgaggattgggtaccagaaaattagccagtattgtgtgcttttccttactaaaaaaatgaggcctcgctgagtagggccagatgagctgtatattctgagattatttatagtgtttatgatagagagaccaaaaacagtaagcacttaatagctttccttatttacaagtcagattcatctaagggatatttttcttttatttttctggtgcttgaaatgttcctttaaaatagattatcagaggatacacagtgacacaaaatttgttgcttgtgaaaatgcagagtggattaagcttttctttttcaaggctctgcaacaaaacaggtacatttttatttcagtaaaaacactgctttttttttttgcctccgtcacacacacgagtaacataggatagatatgtgtatgtgaacatgtggctcttgttcccagttgtgtaatggatgcattcccttaaagtttgcagtaaagtgaatgtttattaagcaaattgtttttccccagtgacttctactgtaaaaatggcattgtctttcagtaggctctgaatatagtatgttcccatattctttggtaagatgaccaatcaaccaaaaaaaaaaaaaaaacaaaaacagccccaataacaaacaaacaaaacaaccctttaggtaccataaatctataggaaatactaaccttctgatgaagctggcccgatgccacttattgttgtcccccacgcctaagctatggtatatggctttaataacaaaatggcaacacacaatagtaccacaacctggagggtgttactctttcttctgctcacccttcctcccattgttcccatgggagagaggacagacaccaaggctgtagcaaataggttattttaataacctcagcatccttgtttctatatgatatacatttgatagccaagttgaatttacccacctctctctaaacactttttcctaaccctttgtcaatttgtcacaccatctttggatgaagagtggtacctgatggtgtatgatgcttaacaatcgaaacatctgtaccttgttagccataaaggctcatcccatttccttccataaacatctattgtaatacaatatggattgtgtaaggcactgggctttaggcccccagcccgaatatctgtcatctattaagtacttactgtggataaagaaggcagtatacttaacatgcactatttcatctaatttttgcaaaagctctttgagt

SEQ ID NO: 874 - DNA, 318 bp, Homo sapiens
ataacatgcccagcttggtttcttgcttggttgttgaattgctgcatgaaaatctgatccctgcagtctttgagcctgcagcccagtgaaagagatggatgtgcacacaaccaagcatgaacaagatgcattatgacaagtactatggtagtacagactttgtgctctgtgataattcctatgacacgacttgcagttgatcccaggaggtagcatctgggacatagtcactttagcaagtcctatttattctagcttgggagagttccttgcatcttaactctgtatactctgtgatcaccagacagtcttggtcta

SEQ ID NO: 875 - DNA, 320 bp, Homo sapiens
tccttctgtggtggctgcagattaagtctgaaccgtgccagaaatctcgttgcattttttgatgtagcagaaatgaacctggttcattccatcttaacagctttagccaaatggctcagaagggatctacccgatttcataaagaagagttaatgtgcagtctggtttaatacaggtgcccttaaaatacatttttgttttgttttgttttctcacttccaagtttaacatgtccatggacattggctttagtttccccaagatgagtccatgaatgaccttgttccagtatcccttgctgatttgagttcccaagtaat

SEQ ID NO: 876 - DNA, 718 bp, Homo sapiens
agtggaagggagaacctagtatgagactcaggtctccaccctgcacttgactaggatgctgatttgcactcaggacatgcagcccttcaaggcatctcaaattacagacatgaaacaacagatgcctggatgaattttacaagcagggcaacagtgaggaagaaggctgtgtagcaaaatatacacttagactccagacctatggctttatcttgtcaatatcattaatattcacgggacccaagctaaggctgaagttagtgagccagctctgggtctggcaatgtactctagtgagaagatcaccggccttgaagtcaggcttgtgtctgaatcacagctctgcattttaactagctgtgtgacctcaggtgatcaccatacttctgagcctcaatttccctatctgttaatttaaataagggtgttggtatgtcaccaaaatcccttctagctctaagattttaattaatttgttaaccaatggaattgttgagttccccccaatgtttttgcataatctttgttataactgtgttttgtttacattagaatagtagaacaacaacatcaacaaaaaacccaaatcatccccaacttgatataattgcttctctaccccagctgttgtgactttgtgtcacttagctgttgtcaccctgctgagctagagttttccttggtaaaagaaaatgaatgacagtttatgttttaaagg

SEQ ID NO: 877 - DNA, 718 bp, Homo sapiens
agtggaagggagaacctagtatgagactcaggtctccaccctgcacttgactaggatgctgatttgcactcaggacatgcagcccttcaaggcatctcaaattacagacatgaaacaacagatgcctggatgaattttacaagcagggcaacagtgaggaagaaggctgtgtagcaaaatatacacttagactccagacctatggctttatcttgtcaatatcattaatattcacgggacccaagctaaggctgaagttagtgagccagctctgggtctggcaatgtactctagtgagaagatcaccggccttgaagtcaggcttgtgtctgaatcacagctctgcattttaactagctgtgtgacctcaggtgatcaccatacctctgagcctcaatttccctatctgttaatttaaataagggtgttggtatgtcaccaaaatcccttctagctctaagattttaattaatttgttaaccaatggaattgttgagttccccccaatgtttttgcataatctttgttataactgtgttttgtttacattagaatagtagaacaacaacatcaacaaaaaacccaaatcatccccaacttgatataattgcttctctaccccagctgttgtgactttgtgtcacttagctgttgtcaccctgctgagctagagttttccttggtaaaagaaaatgaatgacagtttatgttttaaagg

SEQ ID NO: 878 - DNA, 779 bp, Homo sapiens
tggggaatcactgattgacattgtctcagaaatacattttctgtcctttaaaaattctgaaataatatcaaatttttctcccctcagaagcctacgccaaataagtgctgtaatcttagtacaactttgtagtacagtcagactcatttgttgatgtctgactggctgagtttttaaaacctattattcccccttccgccccatatctggacatgccagtaagaaagctcaaatgcttccacctttgtgcctggtggaagttcaaaccacctaagaatcctcactgcagccctacctccaagccactaggaaaagccaggctcctctactttccctgctcaagccatttctggacctgcttgagaactcgctgctctctgtaaaagcctcgtgtgagtgataaaccttttcatatctatttggtcctaatgtaacatcagtcctaacacctaaaccaagttttgggtaaggggttcaacctctcctctgtgggatgactaaacactttatgcaacaagcagagggtctaggagatgaccactaccactgcagggctctcctcttgctttagtttgctaactgactcttgctggctagaattttttttttttttttttttttgtcactgctggcaagctcatgctttgtgctgtgctgctttgtactgcgttcactgagccttaccaagcttctgttatagatgtgctcagctaagttggaatttttgataattggcatttaagaacaagaataaagtggcatttaagaacaagattaaa

SEQ ID NO: 879 - DNA, 940 bp, Homo sapiens
caatgattcattcaatatttattaactacctactgtgggccagtgtacactccggacttgagtctgtagaggggcactcttattccaatcagtagaataaacgtggcgtgagctttacagtgttcctctgggtaaggcaagtaatgcttaagtagttgtacttttaatctagtgctaattaatggcctcttaaaagtgcagtgttgggtcaaatggtatttctagttctagatccctgaggaatcgccacactgacttccacaatggttgaactagtttacagtcccaccaacagtgtaaaagtgttcctatttctccacatcctctccagcacctgttgtttcctgactttttaatgattgccattctaactggtgtgagatggtatctcatagtggttttgattcgcatttctctgatggccagtgatgatgagcattttttcatgtattttttggctgcataaatgtcttcttttgagaagtgtctgttcatgtccttcgcccactttttgatggggttgtttgtttttttcttgtaaatttgtttgagttcattgtagattctggatattagccctttgtcagatgagtaggttgcgaaaattttctcccatgttgtagggacatggatgaaattggaaaccatcattctcagtaaactatcgcaagaacaaaaaaccaaacaccgcatattctcactcataggtgggaattgaacaatgagatcacatggtcacaggaaggggaatatcacactctggggactgtggtggggtggggggagtggggaggggtagcattgggagatatacctaatgctagatgacgagttagtgggtgcagcgcaccagcatggcacatgtatacgtatgtaactaacctgcacaatgtgcacatgtaccctaaaactttaagtataataataaaaaaaaaaaaaa

SEQ ID NO: 880 - DNA, 24165 bp, Homo sapiens
tgccctcaccacaccacacctattccaaaattgaccacatagttggaagtaaaactctcctcagcaaatgtaaaagaacagaaattataactgtctctcagaacacagtgcaatcaaacttgaactcaggattaagaaactcactcaaaaccgctcaactacatggaaactgaacaacctgctcctgaatgactactgggtacataacgaaatgaaggcagaaataaagatgttctttgaaaccaatgagaacaaagacacaacataccagaatctctgggacacattcaaagcagtgtgtagagggaaatttatagcaataaatgcccataagagaaagcaggaaagatctaaaattgacaccctaacatcacaattaaaagaactaaaaaagcaagagcaaacacattcaaaagctagcagaaggcaagaaataactaaaatcagagcagaagtgaaggaaatagagacacaaaaaacccttcaaaaaattaatgaatccaggagctggttttttgaaaggatcaacaaaattgatagaccactagcaagactcataaagaagaaaagagagaagaatcaaatagacgcaataaaaaatgataaaggggatatcaccaccgatcccacggaaatacaaactaccatcagagaatactacaaacacctctacgcaaataaactagaaaatctagaagaaatggataaattcctggacacatacaccatcccaagactaaaccaggaagaagttgaatctctgaatagaccaataacaggatctgaaattgtggcaataatcaatagcttaccaaccaaaaagagtccaggaccagatggattcacagccgaattctaccaggggtacaaggaggaactggtatcattccttctgaaactattccaatcaacagaaaaagagggaatcctccctaactcattttatgaggccagcatcatcctgataccaaagccgggcagagacacaaccaaaaaggagaattttagatcaatatccttgataaacattgatgcaaaaatcctcaataaaatactggcaaaccgaatccagcagcacatcaaaaagcgtatccaccatgatcaagtgggcttcatccctgggatgcaaggctggttcaatatatgcaaatcaataaatgcaatccagcatataaacagaaccaaagacaaaaatcacatgattatctcaatagatgcagaaaaggcctttgacaaaattcaacaaccttcatgctaaaaactctcaataaattaggtattgatgggacgtatttgaaaataacaagagctatctatgacaaacccacagccaatatcatactgaatagacaaaaactggaagcattccctttgaaaactggcacaagacagggatgccctctctcaccactcctattcaacatagtgttggaagttctggccagggcaattaggcaggagaaggaaataaagggtattcaattaggaaaagaggaagtcaaattgcccctagttgcagatgacataattgtatatctagaaaaccccattgtctcagcccaaaatctccttaagctgataagcaacttcagcaaagtctcaggatacaaaatcaatgtacaaaaatcacaagcattcttatataccaataacagacaaacggagagccaaatcataagtgaactcccattcacaattgcttcaaagtgaataaaatacctaagaatccaacttacaagggacgtgaaggacctcttcaaggagaactacaaaccactgctcaatgaaataaaagaggatacaaacaaatggaagaacattccatgctcattggtaggaagaattaatatcgtgaaaatggccatactgcccaaggtaatttacagattcaatgccatccccatcaagctaccaatgactttcttcatagaattggaaaaaactactttaaggttcatatggaaccaaaaaagagcctgcattgccaagtcaatcctaagccaaaagaacaaagctggaagcatcacgctacctgacttcaaactatactacaaggctacagtaaccaaaacagcatggtactggtaccaaaacagagatatagatcaatggaacagaacagagccctcagaaataacaccgcatatctacaactatctgatctttgacaaaactgagaataacaagcaatggggaaaggattccctatttaataaatggtgctgggaaaactggctagccatatgtagaaagctgaaactggatcccttccttacaccttatacaaaaattaattcaagatggattaaagacttaaacgttagacctaaaaccataaaaaccctagaagaaaacctaggcattaccattcaggacataggcatgggcaaggacttcatgtctaaaacatcaaaagcaatggcaacaaaagccaaaattgacaaatgggatctaattaaactaaagagcttctgcacagcaaaagaaactaccatcagagtgaacaggcaacctacaaaatgggagaaaattttcgcaacctacttatctgacaaagggctaatatccagaatctacaatgaactcaaacaaatttacaagaaaaaaacaaacaaccccatcaaaaagtggacgaaggacatgagcagacacttctcaaaagaagacatttatgcagccaaaaaacacatgaaaaaatgctcaccatcactggccatcagagaaatgcaaatcaaaaccacaatgagataccatctcacaccagttagaatggcaatcattaaaaaggcaggaaacaacaagtgctggagaggatgtggagaaatagcaacacttttacactgttggtgggactgtaaactggttcaaacattgtggaagtcagtgtggcaattcctcagggatctagaactagaaataccatttgacccagccatcccattactgggtatatacccaaaggactataaatcatgctgctataaagacgcattcacacgtatgtttactgtggcactattcacaatagcaaagacttggaaccaacccaaatgtccaacaatgatagactggattaagaaaatgtggcacatatacaccatggaatactatgcagccataaaaaatgatgagttcatgtcctttgtagagacatggatgaaattggaaatcatcattctcagtaaactatcgtaagaacaaaaaaccaaacaccgcatattctcactcataggtgggaattgaacaatgagaacacatggacacaggaaggggaacatcacactctggggactgttgtggggtggagggagaggggagggatagcattaggagacatacctaatgctaaatgacgagttaatgggtgcagcacaccagcatggcacatgtatacataggtaactaacctgcacattgtgcacatgtaccctaaaacttaaagtataataataataaaataaaataaaaaataaaaaataaattaaaaaaaaaagtgtggctgccctaaaatgtttttgtcatccatatacaattgttgtctcgctttggtcctctttaacggatggttttataatcagctataaaatttaacaggccctcttaaatgcaggtttctgattaaaaactctggagactgtgatattagaatcgaggaaaaactttcaaattgaagagtgaatagtgtttggttttctttggactatatttgtataaatatgttattagtatgtgttccagaaattatgggaaacttctataattctgatatgatttagagtacattattaataattataattgttatataaaagtgttgtatgccacagaagtaaccaagattcctagtcaattgcagctttaatagtagctatagacttttgtcatccatagacattttgtcttgcttttgtccttttcaaaaggcagtttataatcagatatcacactctgagtgcaggtctcagataactttaaaaattgttttattggaatagaggaaaaaatgaaacttctaggcttctcacagatagctgatgtgttaagcattgctaatcctctcattttcagagtcaagatagcatatttctttagagttatttgcaacttttaacaaatgagtaaaaaatacttccatgaaaaaaatttagagcatatttgtttctctctacctgatttctcctgaatatggaaactatttgtaagtattctcaatttatgccagtatacttaattgcataagtgcagtaagaatctgtttttgtcttgtaacaggacacaactggagaaattgattattttaccaaggcttttactggaatggcatgcttccttcaaagaatcaaaattaatgtatagagccaattaaagccccctggggaatctaacctcagaccttgtctatagtccctgtacaaggttctgtcatacagtccctgtacaaggttcctgacctgtggtaagtaaagaatgtcactttctaacaggcccaggaaccccaagttattttgggaccttgagaagagaggaatttacccaactcataggtatttgaggatacaaacccatggctgagcttggcttttaaaaactcttatctgagattcctcatggaacagagttccatcaaagctaatttaaacaaaaaagaccctaagtgaaaaataattattcttgctgcactttatgcaaataatcaggccaagtatagtaagactaaagtacatttctgtaaacaaatcagttctatcatgatttgtttttaataaaaatggggtctggagagagagaaattatgcttcaagaggaaacctattgttagctgttgttagctgtccttgagttttttctacaattttgactaaatcctaaattatttgtgggttggaagtcgccagactaatgctttcaaatctttgcttttaaaattgagtattgtactcctcatcctaggactcattatttaccttatagtaggctgttcacctaaatactgtactaaaactatagatgagagtactaatgtttttgccatgcaagccttagaagcccagccagacctgcatgagtcgctcagacacttgaaagtggtcccactcttctcaccttggggttgactcccattcccactacgtcccctgtcagcaagaagaacccagagcaatcgacagccttttcccatcttcataccctacactttaagattaaggtgttacaaaacccaaagtgatggactgaaactgcctttgcaaaattatgattgagacagtaaaagagatctaacttaactgactccatcttgcttctaacttccaagctgtccttgttcattcctgggcataggctgaactaactttgggagaaatttagtctgtagttcatagtttaaacaaagacagtaacaaccctatcccaaagcagacctccttgcctgggtactagattgcctttgtaggactaacattagccacaagattagaaattgcggtttaggagtcatgcagctggaggttacaagatgctgagcctccctaaaatgcttctgagatcagtgcttgagatattttgcagaccctgcacttgatggatcagctggcaccacccagatcaataaactcactcatctgatcttgtggcccccccactcaggaactgactcactgcaaggagacagcttcgactccctatgatttcatccctgaccaacagcgctcctggctcactggcttcccccaacccaccaagttatccttaaaatctctgttccccaaatgctcagggagatgacttgagtaatcataaaactccagtctcccgcacagctgactctgcgtgaattactctttaactattgcaattcccctgtcttgatgaatcagctctgtctaggcagtgggcaaggtaaactcctcaggtggttccactgatataggtgatttaagtgttaaataaaaatctgttacattaaaatgctgaataaagagtgtttaaagcactccacaaagattattttttaaatgcctctgtgtaagaggaattctaatattgtgccaggatatgtcaagctataagataaaaattgagtgcatttcctagaatgcttattctactctaagattttgtgagaggtataataattcatttaactggtaataaacattaaagaagagtcaaacactgatttttgttttaagggagaagagagatttttttttttcaagacacttgcttgagctagatccccaggagtatttttaacactcctctgtaattagggaaacatcagtatgtctgtattgatacatatacacacatatataatatgtatatatgtaagactatgaacagtcctaaatttatactttgggctgataactgtggttttcaggaaaaaaaaaaattttaaacgggtgcaaagtctccccaactggtctaagtgagaaatcatttggcattacctctcccttatcccctacctgctaattacaatttttcaaatatagttatcattaagtgcaaactaccataatcttggcttatcttcatggcaaacttcaattagaaatttagaaaatggggagaaagagtaaacaaggttaagagagtgggttctcagatagaattgggtacaaatttgggctccaacacttaggtatatgtggccttgtgtaaccacctaggttacacaacaggtgtaggttaaccatcagctgccttatctcattaggtccttatgaggatttagtgagctatgcacctgaagtcctcagctgtagccagacagcaagtgttcaaagatgttagtcattgtttttgtttattgttttatcattgtgcagggtcacatagctaaggggaatttcaaatccaagtccatcctacttcaaactcctttgtgctcctaagctgtacagtatagtcaccttggagagtaggtgattggccccaaactacttcagggactgcaggtcgtggccagccagtcctgtatcagacctcgtccttgccagatgcctagtgccccagattccctcaaatctcaggccagatcacctcccacctggtaagattcctccaccttcacccgagcaaaactacacttggtttgggttcccgggtaccttcagtctgcagggacaggggctgcagagtgtactccccaagtctgcctctgctgtcggcctcccagctgagtaggcaaaacattcctttacagagcaatgtgttcatggataaacttgtctctagtgcagctctctgtcagagcacagaacatgaggccaaagcactgcccttcctagggagtcccggttctcgacttccccagaatggaagtttgatttttccgttggcccatttctcagatggaaaaacagattcagtaaggtgccaacgctttgctgaggactaccctggaggctaccgttttgtgaaggggtagacattgagactggagtcagatacgcattctggcttatctcctgacttactgagtgaacttgagcaggtccctttcgcccatgggcgtcggtttcttcatctgcaccaaggagacggaaaactggattacgtgtcgctaaggccccgggttctcagaggaaagctcacccctgcagggccgccttgccccgcgcgcttggggccagctgcacgacaagccccagcatgctggggaggcggggctcagtgacggacagggagctctgcgaattggcgcccggcaaggggtgctcaacggcgcgtgcgcagagggaggcaggcgggtgggctgccggcggtggactcgtcggagccgcgggcggtcaggtagggggcgggaaggagggttggggactggggaccgcggccggagtcgtgggccgtggctcagcggccaggcgggggaacgtgccggcgtgcagcggccgcgcccgaatggcagggtgtggggaccggatctggggggggcaggactagggtgggggtggggctgcgaggggcaggctcgggagggattcgtggggctgaggagatccgaggagatgcagctgggggaggggagcgaggggctctgaagagatttgcggttgcagcatctcgggaggtatgaggtaatgtcggggccctgaggaggaacggggtgtagcatgtgggagatgggagggaatcagggccctggagggacctgggtgcagaatttcagaaatatgaaggaactggggggccccgatgagatttgaggaaatctgggggcgctaggcatctggcaaggacagggtctgagatgataggagcaaggtctagggcgatcctaagtgctattgagaaagggttttcggagtgggctgagggtgagattgagggggtggggtgagttcttgagggactctatcttgttagcagaaagaagggagctggctgaggtgtgaaggcagcacatgacattcagtgcataagaggaaggagcagggtatgagggcagcacagtgcccgatggaatgcaggagatgggggctcagattgagggagagcagaaatctggggtgaggaattggggcgttgaactgaggtgcggggctgagtgtggcagagatttggaaatagggattaaacgatctgagtccgagggatttggggcatatgagtgaggaattgacgagggttgcaatatacagccccaaagattggaatttggaattgtaagagggttggggacagggtttggagaggattgaatcgtggggtggagatgtcctaactgggctataaaatcaaaggaccctgagtagatttgtggattggtgtcttgggctgctaaagagattttccttaaatcgctgcatgggagacagagggagttcaggggacccaaggacctaaaagtaatgtatgaaactggatgagtatatgaagatgagcagagttcaggtgctgaggaacaaagtgataaatcttcagttcagataatcctgaaggagtgtggtaatccctgtgaagggcagaatcttcttcatttattaaacaaagatccgttatcatgaggcaggtatggtattgccactaactccattctgaccaccggtcccccggcccactgaaagtggtaggctttggggaagaagaagtggaactattcaaggtcatctgcctaagccctttttccctgtacccccaagctacgatagcagatagaaagtgagacctccaggggaatgagtggaataatttatcctatataagatccattacagcttgaaggggcagtggctctgtgagtgaggtgtttgggctcggagacagacaaaacaacaacaacaaccaccagaaaaaaaaaagggaacccttaggtattgagcatttagtcctgtgctagactgtaaagcagtggttcttaaccaagtctggctttgtctcctaggagacattaggcaatgtctggagatgttttttggttgtcacagggtgggggatactactggcctcaagtgggtagattaaacattaaacataatgttttatgttaaacatttgacaatgtgtgggatacgcccttcccccccgcagtaaggaattatcctgcctaaaatgtcagtaatgccaaagttgaggcactctgacctagagtcagataccctgggttcaagtcctagctctatctcttcctgactttaagtcctagctctatctcttcctgactttgtggccttgaatgagttacttaaccacccagtgccttggctcttcatctgtaaaatggggttatgataacaagaccaatgtcacagaattgttgtgaggatttagtgaagtaaactagcatgcctaggatctggcacatagtaagttctcaaaatctagtaatttttagtcttgtatctacttctttactcagttttcatgacagtccttctaagtaggctctactgtattcagttttacacatgaggaaactaaggcttaggaagtgacttgcctaagtttccatagctaggaatgacacagttaagctcatacccagatctctgtaactccgtatattcccgctttccttgcttcttccttgctagggcctgcttagtcttattttctcagcccattcccctctaatgaaaaagaggattgccagtgagtatcactgactatcagattgaactctaaagttggggggtaaatctctctgattaggtagggaggagccctggactttgttcttggtttgcccttagaccaagacctggggctagataaggagaggagcctgaggttatcaggcaggatgaggtgcaacggactatagggtgaggtatggaggccattggcttgaaaaaacacctcatagcagggactgaggctgaaggcagtcatactctgaaggagagtaactactgttctgtatggtctcttttggtctgcttttccctggaacagaatttggctctatcatttccaggactagctacagggttgctgaagccagttcagaaacaaagctagactgtgtctgacagcaagacttagctggaatatctgtgcacatccctaaaagaaaatatgtcatgggaattaaatcagccctgtctaaactccttactctaatttcctatgttaccttgtcagtagctacggcacttgtcctgtcagcctcaatctattaaaaatgcaaatgattataatttgttgagtgcttattatgtgcattatcttagtgaattcaatcctgctaacagtctaggttttattccttgtttacagataagaaaaataacaggttaaatgacttacccagggctacagagcaagtagctaggttgggatacaaacccagttctgtcttacacctatgttacattatagtagttttattagaagccttttccaacccttcagagcccctatgtttatgtctggagaatagttggaagccagaagtttataaggcccttaaagtagatcattgtctatgcacactgatgtgtaacctttgtgacattccctccatcttgtctttctggtaaaacaatcaaatttaaaaatcatttctaggtgcccttaccaacctctcagccagactttgtctaaagctagggaactatgaaacatcctttaagttagtaattttatggctgggagttgatactgggatttgaatccttgctctattacttattggttttgagaccttggacaggctactttctctgagcattggtttccttatttttgaagaggaatcacacttactttacatggttattatgagactatgagaacatataaaaaaatgcctgacaataaatagtagttgctttaagagtgttagcaattatgagaggaaggcagtgctggaagagaactaagtgttgctttgtcatatttatttatttatacagggtcttgctgtgtcacccaggctggagtgcagtggtgcaatcacagttcactgcagcctcaacctcctaggctcaagtgatcctcccatctcagcctcccaagtagctgggaccacaagtgcatgccaccacacctgattatcttttaaatttattgtagagatggtgtttcactctgttgctcaggctctttgccagattttgataaccctaagtagtctctgctagtctccccaaaattctcatcccattttgtatatttcctaggatctccttgatcctttaatcataatctcatgattaaatgaacagatgttatatgcagagaaaggaattgaaagagagagagggttgaggttagttggaggtccctgagaaggggctattgatttttcctttgtcttatattccttgagtcatactggcagcgtaggtactactcaaatgtttgtgaaagatgcaagggagtctttctaggtcctgcagttttagaggaagacagagacaacaggcaagcatgttttccaggaaaccctattattcatttagcctgcccttgacatagtttagctatgtttaacttagtaatttagctaaagttttctttctctacaaacatacttccttctggatcgttttgtttgccccagactggtacaacttcaggagcatgcctgtgtttccctataagcccctacttgttgagtttatcttagttgtctgcaggtgccttaaatgccctgagtaatctaaacttcatcagaatcctctcccacacacaggagtggatgtcaggtgatgacctcactgaattcgttaaagtcagtcctgctaacgagtggcctttggtggcacagtgatagttttgcacttgattagcattctgttagaatgcatgaggaataaagtttagaaagctgacataaaaggaaatgagataaaccttgcaaaaaacccagtcaaaccaggggagcgtgtcaatagtaggatggacctttatgtcttgtgaaaggaaatgcaatattttacatgttgtctagtttttaggggaaagcactgtttatgtctggtttttgctcaaaattgtatcaccagtaccgttcacagggccagacacatagtaggtgcttagtaaagatttgttttgttaattgcttaaagttctccagttttgctcatggcctaagccaccaaaggctgatataggtaaaggaaatggagatatctagagaaccaccccatggtggcaattcaagcattaggtgaagatttgaaaccttagatcatctctaatctttagattctgggatcaggtaaaacaatttctaggagggcttagaatttttattatttaggtttatgtatctggggccttgggtacagtctgctgaaaagtgcctattcatttcttctaataggttgggtggtggcagcagcagttgctgctactgctaataataataaaaactattatttatgtatagttaattgcatgcctggcttggtactgtacttagtgctttacacacataatctcatttaatctttgcaataactttgtgaggaagatactattttaaagtccctttccatagataaactgagaactacagaagtattaataacttgctcacgtctccacaataagtagtagagcttgaattcaaatccaggaaagcctgatccctcaggcctgcttccttaatctatataatactgtccactcctagttcgtgtcttttagtcctagttctgttgtgtgatttgtggtcttaatttccctctcctggtcttagttttctcatctattttacaacttgagattactaccttttcttccccttttgcccaggctgaagtacagtagcatcatcacagctcactgcaacctccacttcctggtctcaagtaaggagattgctacgaattctagcatttcatacttagtctctgcttgaaggagctacagcagctcattttctgggcaagacaagttgtaaattcatttacccatcagtttttagcctgtatgtctggcattctcaatcaaaactcttcaaaactgaccagcccttttattaatctttatatgcctttatatgccatgaaaggaaaggttgttcatgctttcaaaatgtagtttgtaaactgaatgcgttattaatactagtactagttattgttaatgctgtttctggttattatttatttagcatccttttattgtacacctaagggtatcaggctaagtactttatatgcattttccatagtcattacagtactctttttataaactaagaaaacaggtttagacaggttaaataaattgcctgcttccccacaacttgtgacagtgctaagatatgatctcagtcctatataactttaaggttcattcttttgttttgtttgctttttctactaccttggttactcatttcatggaatggggaaaacccagtggtgctagaagaggcgagattaatatggaatataattatgtaatttttctgagtcttagggcagccagagtagacacagcttaagggacagattctcatcgggagctgaagagatgtgctagtacagtatggtatgggatgtacagtattaatcattaggtcaagggatgtgggaagatggtaggctgatgttagatgaggtgggaggtcaagaattaatggcacaaagtgcacaacaggaaacagacattcaagggatcatgaagggagccaagatgatacatagcatgttggatactcattctgattggttgtacagttgatagctggcagaaaatgggcagcttacttaaagatttggaatgataagacaattccttttatttgtgtagtcttttggggaaactgaagtcaaattgaccttctatctgagtcattctcagtattacagtaatgaccagatgtgcccttctggaggagacgggctctatctgcctgtctcttagctccatttcaggctaagatccttcacaaagcagtgttttcaagtcatggaagtgggaaaagtggttctggctttttccaggtttgagactatttccgtgcctcatgctttagtgaggggaacacaggttttcctggcaaagcatggcagctttggggcaggaattcttgacatcctcagagagcttggtgaagctgtagtcagctgagataatttggggatgtgggcatagtaaattcatttttttaaacctgatgtcttagacagagaggtaggaagcttttcaattgaaggagggatatgatattccagaaagcttgggaaataatttgctgctatttttacaagttggcagccttgtttaataaactgatctgcactgccagctctgggaagaacacagatgtccctgtgcattgtaaggtaacgttctagattcaaactccaaatgtcctcagtctgttgtcccagatgatagaagagagaactgtagctattgatttagaattgagaagggttgcatggatcctgagttgtaatttctcttttttttttttttttttttgagatggagtctcgctctgtcacccagtctggagtgcagtggcgcgtctcggctcactgcaagctccgcctcccaggttcatgccattgtcctgcctcagcctcccgagtagctgggactacaggcgcctgccaccacgcccagctaatttttttttttttttttgtatttttagtagagacggagtttcaccgtcttagccaggatggtctcgatctcctgacctcatgattcgcccacctcagcctcccaaagtgctgggattacaggcatgagccaccacgcctggccctgagttgtaatttctatcagtatgtctatgctattgcccctagacacttggcatttaagaatttaccattcatagtttcagatatccacatcagacctcatacgctcatgatatatggtaaatattattttgctgaggtatggatttgagtcataatgggttgcaagcttgctgtgtgagagtaggtcactcagctaataaatcaatctatcccactctatagcagcagaatctcataactatattagtgttccttctgtgttatggagaaaatgcgtatgctataaggcagcattccccagagcgtggtcaagggaacattagttaatcattgttatgtgacagtaaaaaatagcttgaaataatgttgggttaaataaagtaaaaatatctgtacttcaaggttccactatgtttgagctgtgtgaccttgagcaagtttttctgagcattcgtttcctcatctgtaaaataggataataaaaatattaccacttcatagtgtcatcatgaagattaaaagagattaagcatataaagtatctgtcatagtaactagcatataataggcactagatgcatagtttcccttgcagtacaaaggaagtgggatatcagggaggaaggattaactttagataattgtgcatgtctgctgctatatatttgtcagattgcattccaaagctaatatggtagaaatttgttgtaatgtatatctctacattaactccccttcttctctatgcctggagaaagagttgatgtcatgtgcaaagtgttcttgagctaaatgcattgtccttaaaatcaaacgaacttgccctccacttcctccttctcctgggtggttgaccatctgcagatcacaagactgcacagatacagctgtaggatttgcgtttatgaaatgctgactttatcatatgcctcaacttgctagacctattcattctgatttggggtatacgttgacagtgacctaaggctacagagcactgagatctctctgggtcaacttcataagtatatgtatatcaagagggttggagtgttcatggtttgtattgggtgacgcagagggtactctaagccagaaataaactgtcttgataaggcactgctattttttaaatcatctaggcttgagtctttggctatctctgctcttcaccactcccccaccataatccactcacctttcaaatcttactgactatacttctggatattgctcaaatgaatctttccatttccaccacctgctccctagttcagactccccattatccccgtcttctctgatgtttccccactccattcctgctttgatcatatcatcttcctgcttcaaaacattcatcacctcaccatgcccttgaaaatgacgctcaaaaatctcattttggctctgaagaccttttataattattcccccaatttacctttccaagtctgttactctattccccatatatactcccacagttttaatctaaggataataaaaaagagaactaaaattcattaaaggcttttttggtgcagagccaaatcttagcattctatacactctatatattatttcattcttacattaactctgtaaagacagtatttttccattttaaaggtggagaaaataaaatgcatagagtttaagtattctctgttttctttctaatacatgaaacttcttgtcctttcctttgccttttatactttgttaaggttgtgccttttgcccacttctttcttccctctccatgtatttatgcatctttccaggccaatataaaatgtcatcttccctttgaaaattctgtatcccttcagattggaatgactcctcaacccccatcaaacttagtttttatttcgtttatagtaccactttctgccttcattattatttacctacatgtcttgtcttttataaagtttgaatatctgaagagcaggatctgtatcctaaagacctcttgtatctagtacagaacaagatacctaaacttagatgggtggataggtgagtaagtaggaggatagatgcgtggaaaatgtgtattttctgatctgatgttttgcagatcacctaaaactaatcatcacaattttctgcttctgtggatgattcctaggcccccaaacatgacacaataaactctgtgacatgattaaaaaaaaaaaaaaaagcctccacacttttgcttacatggttttctttgcttaaagtacctttatcctcattccttcatttctttcaagacatatcttaggagtgaaactgcttttgggaagccttccccaagtctgttaggtagaatccatcattccatccactgtactccagcagaacattatgtggacttgcatgttatacttattccttttactgtgcataattctcctgtgcttttctcttagtgtaaatcagaagttgtaaaattcaccaaatatgaaaataatcattagctcattagcatttattacaagtatactacttccctggtgctatactaagcacatcatatttatcttgttacttagcccttataataaccatataaggcagacaccattattacttctattttacagatgagtgatggggaaagagcttttggaagtttgagttaattccttatggtcatgcagctaagtaagtgtctgagactacagaatctgaattatttcccactatgcagtgttttgtctggtttgtttccctatctgtcaccctcacgtgacatataatagacctcaataaaatagttgttaagtaagggaatgactgaatgactggtcatagctattctctaaatgtttcttgagtgaatttatttatatagtcagaggaaaatgaataatggtttctttttctctttagcaggaatttgaccctctagggcatgaatactgtgctgttcagttctgagctgtgctagcaatacccttcaaaggaagagcaatggctgcagcagcagcttctcacctgaacctggatgccctccgggaagtgctagaatgccccatctgcatggagtccttcacagaagagcagctgcgtcccaagcttctgcactgtggccataccatctgccgccagtgcctggagaagctattggccagtagcatcaatggtgtccgctgtcccttttgcagcaagattacccgcataaccagcttgacccagctgacagacaatctgacagtgctaaagatcattgatacagctgggctcagcgaggctgtggggctgctcatgtgtcggtcctgtgggcggcgtctgccccggcaattctgccggagctgtggtttggtgttatgtgagccctgccgggaggcagaccatcagcctcctggccactgtacactccctgtcaaagaagcagctgaggagcggcgtcgggactttggagagaagttaactcgtctgcgggaacttatgggggagctgcagcggcggaaggcagccttggaaggtgtctccaaggaccttcaggcaaggtataaagcagttctccaggagtatgggcatgaggagcgcagggtccaggatgagctggctcgctctcggaagttcttcacaggctctttggctgaagttgagaagtccaatagtcaagtggtagaggagcagagttacctgcttaacattgcagaggtgcaggctgtgtctcgctgtgactacttcctggccaagatcaagcaggcagatgtagcactactggaggagacagctgatgaggaggagccagagctcactgccagcttgcctcgggagctcaccctgcaagatgtggagctccttaaggtaggtcatgttggccccctccaaattggacaagctgttaagaagccccggacagttaacgtggaagattcctgggccatggaggccacagcgtctgctgcctctacctctgttacttttagagagatggacatgagcccggaggaagtggttgccagccctagggcctcacctgctaaacagcggggtcctgaggcagcctccaatatccagcagtgcctctttctcaagaagatgggggccaaaggcagcactccaggaatgttcaatcttccagtcagtctctacgtgaccagtcaaggtgaagtactagtcgctgaccgtggtaactatcgtatacaagtctttacccgcaaaggctttttgaaggaaatccgccgcagccccagtggcattgatagctttgtgctaagcttccttggggcagatctacccaacctcactcctctctcagtggcaatgaactgccaggggctgattggtgtgactgacagctatgataactccctcaaggtatataccttggatggccactgcgtggcctgtcacaggagccagctgagcaaaccatggggtatcacagccttgccatctggccagtttgtagtaaccgatgtggaaggtggaaagctttggtgtttcacagttgatcgaggatcaggggtggtcaaatacagctgcctatgtagtgctgtgcggcccaaatttgtcacctgtgatgctgagggcaccgtctacttcacccagggcttaggcctcaatctggagaatcggcagaatgagcaccacctggagggtggcttttccattggctctgtaggccctgatgggcagctgggtcgccagattagccacttcttctcggagaatgaggatttccgctgcattgctggcatgtgtgtggatgctcgtggtgatctcatcgtggctgacagtagtcgcaaggaaattctccattttcctaagggtgggggctatagtgtccttattcgagagggacttacctgtccggtgggcatagccctaactcctaaggggcagctgctggtcttggactgttgggatcattgcatcaagatctacagctaccatctgagaagatattccaccccataggggatgagaaattatcagtttcttctgctcccaagccaacttcccttcccttagttcttggttgttagtggcacatgcagaatagactcagcctatgtcctgattccagctgggtagttctagaacttcagaagctccatcttttaatgtttttatttgttatgtccccctccccgcttcccacctaaatttagagctttaaaagatgcactgcccaaataggacacacgatggtgttagctgaagtttgattagcaattaggcacttccaaggctttagtagagagagccactttagccctttgtgccatgtttgaaatttgcccttgtattaaatccttgattttttcccatttggctttgatgcccttgatccattgtttccttcctactataatgtgcttcatctgtgacactttctcttgaactctgattggattcactgtgcatgcttcagtgggatctgctccacctttcagtgacatttaagacatcatattcccgtaacattatgtctcagtctgatcgtctttaccagtatgaaagtcattcatttagtgctaccaaaggggatacacaagccctttaggaagcagtacctctcgcctggaggatctgtgccatcttggattgagaattgcagatgtgacagaatggattgaccctagttggttggtattgatgacttcagcctggaaattgcttgccttttaaagaagcatatatgggttggaattatgccaaagcataggaagctgggaataagcaaacaaatgctgatatagtcagcaaatttggatagtctctagggctcatcatttttcatactacctctctcttctggcctgtgtctaaggaattgtacaacataggccagggccaacaaagtggagaggtggacacattttcatgttcattactaaaacaaacagcaaaactattggtttgttattctgtgttttcctcaagtcagtacatactatttggtttcaggatttctttccatttctctatcaagcattaaataattgagaactgtttcttcatctctggtgttcatgtcttttaattaaatacggaattttggagatgataagagggataacctgcgctatgccattttgcttccttatctcactgtgttctttcagagtgtagatatctacccaggtcaaaattcagccaaaagcactattatgtaaagataataatccaaatctttctcccaaatacatgtgtacagaatcatcccccaaggtttagagtcaccaataccctattctgagcttctgctgtatgttttatgtttataattacagttcacaaaaaggaagttagtcttgtttttaagatcagaagtgggtgagaggacctgtgatgaggttcctgagggtttggtgtttactaagtaatatatcttactctaggtgcagggctgatggcaagccaaagagcaactgccttactttgatgtaaacaaaatttgctaaactgagctgctcaaaattgtttttatggtagtagtgtttctttggattgtatcataatagctgccaaaggataggtaaagaggtcattaaaatgatgttgaactagtttgtcttgttcttttcatctggagaaagccccatattctgattatgaaattgcatccgattttcaaagattgggtaattgagaggaaattgatccaattgaaagtgcatcacaaatgactccactagttattagagccactttatctgtgggggcacccagcagcaggagatctgtctttgctgtcagtgggggacttgctgaggcaataacagtggctcaggcctttggcacacagtttgcagtggagagagaaatataatattgtgggcaggctgaaggtaaatgaggccaggaatcctccagctgtctgtgcttttgaaagaggtgccatcactgagtgacattcagcatttagatctctacccatctaaaccagtcatgccttttccctcaagtaaagcagttatctgttggctcaaaatggaagtgtgatctgagtctttttcctttttcccctttgatgtgaatattttaggctgtgcttagtacagtcgatgtttaattatctgctgtgttgactaaattgcagactagggccccaagaaactaatttgttcaattacagcagttttttgggttttttttttttttttgctttgttttttaaagcagcagtacccttgtccaaataaagtcttatatggaagtctatcatgtaaaatagatcaaagagcagctgctctggttgaagcaggtttgtgccgctgaagaatatgctgtttcctccctttaccttacctcctgtgctaccattgcaaaacttgtgaatctacagaatacttttctgaaaaccactgaactacagcattgcttaccttatagttctgtcttattagtcatgtggccttgggcaagtcatttaactcttcctcttctggaaaataacaaaaatgatccctgcctcctagaagggtatgagataacatgtgaaaataacctggtttcattcctggaatattccataaatgatggctgttactcttttatctagttgctcaaaagagcacctgatggtgggaagtggtccaaccatgctaaacagttcctttcttcttgcttaacaggtttctatttggtgattaaaacctttctcaggcatttctttcccctcacaagtctccaaatatatcaagttcatctcttcctttctactgtctatttcacattcctattatataaatcactgtgttgcaattatctgtccatatatttgagctttattgagggctaactaatctagctaccagcatgtaacatggtgcctagtatagaatatgttatcagttatttaattggttcaggtatttacctgacttaatgggactccagtaacccgagtcttcctagtgtagcccccttagattagataaaaaaggatactcagacaagcccttttataaggtgtttaaaagctagtggcaaacaattgacttagaggttggttaagcccctcctccctttatcattctgagtggttacatagaatttaagattttggagcaatgattcattcaatatttattaactacctactgtgggccagtgtacactccggacttgagtctgtagaggggcactcttattccaatcagtagaataaacgtggcgtgagctttacagtgttcctctgggtaaggcaagtaatgcttaagtagttgtacttttaatctagtgctaattaatggcctcttaaaagtgcagtgttgggtcaaatggtatttctagttctagatccctgaggaatcgccacactgacttccacaatggttgaactagtttacagtcccaccaacagtgtaaaagtgttcctatttctccacatcctctccagcacctgttgtttcctgactttttaatgattgccattctaactggtgtgagatggtatctcatagtggttttgattcgcatttctctgatggccagtgatgatgagcattttttcatgtattttttggctgcataaatgtcttcttttgagaagtgtctgttcatgtccttcgcccactttttgatggggttgtttgtttttttcttgtaaatttgtttgagttcattgcagattctggatattagccctttgtcagatgagtaggttgcgaaaattttctcccatgttgtagggacatggatgaaattggaaaccatcattctcagtaaactatcgcaagaacaaaaaaccaaacaccgcatattctcactcataggtgggaattgaacaatgagatcacatggtcacaggaaggggaatatcacactctggggactgtggtggggtggggggagtggggaggggtagcattgggagatatacctaatgctagatgacgagttagtgggtgcagcgcaccagcatggcacatgtatacgtatgtaactaacctgcacaatgtgcacatgtaccctaaaacttaaagtataataataaaaaaaaaaaaag

SEQ ID NO: 881 - DNA, 782 bp, Homo sapiens
tggggaatcactgattgacattgtctcagaaatacattttctgtcctttaaaaattctgaaataatatcaaatttttctcccctcagaagcctacgccaaataagtgctgtaatcttagtacaactttgtagtacagtcagactcatttgttgatgtctgactggctgagtttttaaaacctattattcccccttccgccccatatctggacatgccagtaagaaagctcaaatgcttccacctttgtgcctggtggaagttcaaaccacctaagaatcctcactgcagccctacctccaagccactaggaaaagccaggctcctctactttccctgctcaagccatttctggacctgcttgagaactcgctgctctctgtaaaagcctcgtgtgagtgataaaccttttcatatctatttggtcctaatgtaacatcagtcctaacacctaaaccaagttttgggtaaggggttcaacctctcctctgtgggatgactaaacactttatgcaacaagcagagggtctaggagatgaccactaccactgcagggctctcctcttgctttagtttgctaactgactcttgctggctagaatttttttttttttttttttttttttgtcactgctggcaagctcatgctttgtgctgtgctgctttgtactgcgttcactgagccttaccaagcttctgttatagatgtgctcagctaagttggaatttttgataattggcatttaagaacaagaataaagtggcatttaagaacaagattaaa

SEQ ID NO: 882 - DNA, 7499 bp, Homo sapiens
tttggctgcaagggtgtctggtgtttaatctcaggttgctgccgcccgaagagcggtggccaggaaggggaagggttccagtccagctcgctcccgtttctagatgctcctgccgccgccgcagcctcatccaccaagattctccactctctgcccacagatttgctgggctgccggcctcagggttcacagtgagggctgtaggggcaactagggcgggtctcgggaggcaaggtaggcagccagggtcaccagggcagccgcatacgtgcacacgcccagcccgacggcgaggacccccagcaggaaggcacggcgggaggcggcccctgccccctggatgtcccccttggcccaagccttgttggtctgtagaggcagtgggcagcagtgacccaggcatcccctcagtcccagacccttcccctggtccctcccccacccaacatacccattcattcattcatgcatgtattccaaaagcagatacgtagcacctactataggtcaggcactggggatgctgagtggttaataaaaacattaaaatggtaaaaaataataataataataaattttaaaaaataaataaaaacattaaaatggtatatgccactattctaactcatttgattctcacattgacccagaggtagcaattattcccactttacagatgaggaaagtgaggcacagggaagttaagtgacttgcccaaaatcttgcagagagctgggcaccgtggctcacgcctgtaatcccagcactttgggaggccaagatgggaggatcacttgaggtcaggagttcgagaccagcgtggccaacgtggtgaaaccccgtctttattaaaaattcaaaaattagccaggcatggtagcgcgcgcctctaatcccagctactcaggaggctggggcaggagaatcacttgaacccaagaggcagagattgcagtgagccgagattgtaccactgcactccagcctgggcgacaaagtgagactcaaaaaaaatcttgcagagagtggcagactcaggatttgagttcaggttctctgggctaccttccaccttcccgcctcaggtatatggctctttgtttttgtggtgcatttttctcttttatgcccagtcccctccaagtcccacacacagactgaccttctgggctagacagaaggcagcgatgccaacgggccagaaacaacacagcatggagaagacagccaagccgaggtggtcgtggggtagaaatggtgaaagacggctgcctccatcccagtccgagtcactgtcactggatgacatgtcctacggacaggaaagtgcccaggtgggcatctccatccacctttcctgccccattgctctgctctccatagccctcaaaggccaatacctgcccctagggcttccccagagatacaaagagaaaaaagtgttcagagatgggctttcggtgtttgtttgagacggagttttgctctgtcacccaggctggggtacaatggcacagtctcggctcactgcctcccgggttcaaatgattctcctgcctcagcttcccgagtagctgggattacaggcacacgccatcacacctggctaattttgtatttttagtagagatggggtttcaccatgttggccaggatggtcttgaactcctgacctcaggtgatccacccgtcttggcctcccaaagtgccaggattacaggcatgagccaccacacctggccagagatgggcttttgacatttgtatcctggagccctttgaagggaagttgtggatcaggtctccagagaagagccccacccacacccagagttttcagttcattttcaaggggttgacggatccaatcatggacgctacaattgcttacaatctctgagtgaaaagcccccgcatggccgggcgtggtagcttgcacctgtaatcccagcactttgggagaccgaggtgggtggatcacctgaggtcgagagttgggagaccagcctggccaacatggtgaaacctcatctccactaaaaatacaaaaattagccaggcgtggtggtatgcccctgtaatcccagctacttaggaggttgaggcaggagaatcacttgaacccaggatgtggaggttgcagtgagctgagatcgagccacagcactccagcctgggcaatagagtgagactccatctcaaaaaaagaaaagcccctgagcagggacaaacaccactgaaacaaggaacctgcaaaaagatggagattattggccgggcacagtggctcacacctgtcatcccaacacttagggaggccaaggcgggaggatcatttgaagccaggagtttgagaccagcctgggcaatacagcaagaccccatctctacaaaaaaaaatttaaaattagctaggcatgggccaggctcagtggctcacgcctgtaagcccagcactttgggaggccaaggcaggcggatcatgaggtcaggagatcgagaccgtcctggctaacacagtgaaacctcgtctctactaaaaatacaaaaacaaaattagccgggtgtggtggcacacacctgtagtcccagctactctggaggctgaggcagaagaatggcatgaacccgggaggcagagcttgcagtgagccgagattgcgctactgccctccagcctgggcgacagagtgagactccatctcaaaaaaaaaaaaaaaaaaaattagctaggcatggtgtcttgtgcctgtagtctcagctactttgggaggctgaggcaggaggatggcttgagcccagcagtttgagactccagtgagctatgatcacatgtctgccccccagcctgagcaacggagcaagaagaccctgtcactaataaataaataaataaaagatggagattataaaatgctccagtggcctaaatgattagggcaaacctgcctgctgaaaactctagagtttagatttttaagctttttttttttttttttttttttttgagacagagtcttgcccaggctggagggcagtggctcaatctcagctcactgcaacctccatctcccaagttcaagcaattctcctgcctcagcctcccaaaagcggggattacaggcacccaccaccacggccagctaatttttttttttttttttttttttgagacagagtttcactctgttgcccaggctggagtgcaatggcgtgatctcggctcactgcaacctccgcctcccaggtttaagtgattctcctgcctcagcctcccgaatagctgggattacaggtgtgcaccactacacctggctaatttttgtattttttctttagtagaaactgggtttcaccatgttggccaggctggtctcgaactcctgacctcgtgatccgcccgtctcagcctcccaaagtgctgggattacaggcgtgagccaccgcgcctggcctaatttttgtatttttagtagagacgggctttccctacattggtcaggctggtcttgaactcctgacctcaagcaattaacttgtcttggcctcccaaagtgctgggattacaggcatgagccacagcgcccggccccacatgcttttcttaccatgtgactttgatatccttcccatcaagggatgagttctgtgtcccctccccttgaatttgagcaggctcatgactcacttgtaattaatagaatgtggtggaagtcatgttacgtgacttccaaagcgaaatcagaaaaggtgaggcagcttctgctttgctgcaatattcatgctgtaggctggaggtacataagctgcctgactgccctgaagccgttatgctgtaaggaatcccaaggcagcaaacatggagagaccacatagaagccctaagactcggctgggcacggtggctcacgcctgtaatctggcactctgggaggctgaggtgggtggatcacctgaggtcaggagtttgagaccaacctgaccaacatagtgaaaccctgtctctactaaaaatacaaaattagctgggcatggtgacacatgcctgtaaatccagctactcaggaggctgaggcaggggaatttgcttgaacccaggaggcggaggttgcagtgagctgagattgcaccattgtactccagcctgggcaacaagggtgaaactccatctcaaaaaaaaaaaaaaaaaaaaaaaggaagccctaagacaccatgaagagagagaaaagtgcccagccagcccctgactgttctagttccacccaccagctgaatgcaacctcaagaaagatccagaggcagaaccatgcaactaagtcccaaattcctgaccaacagaaaccgtaagagttcatcatgattgttgcctgcctgccttcctttctttctgctttctccttccttccttccctccttcctttccttgtttccttcattccttctttcttccttccttctttctctctttctctctctcttttctttctttccttcctccctccctccctctctctttctctctctctctctctcccccctctccctctctttttctttctttctgtctgtcttgctctgttgtccaggctggagtaaggtggtatgatcacagctcattgcagcctgggctcaagcgatcctcccacctcagcctcccaagtagctggtactacaggaacacgccatcacacctggctaatttttttttttttttttaagatggggtctttctaattttcggaggacaaaatgaaaaattaaataaaaataaagatggagtctcactaagttgcccaggctagcctagaactcctgggcgaggcagtcctcctgcctcgccttctcaaagtgctgggattaccagtgtgagccactgtgcctggcctggaatgagaaattataaaaagtgacaacagtaacttaaaaaaaaaaaaaaaaaaaaaaaaggaaggctgggcatggtggctcacacctttaatcctagcactttgggaggccaagacaggcagattgcttgagctcaggagtttgagaccagcctgggcaacatgacaaaacctcttctctacaaaaaacaccaaaaaattagccaggcatggtggcacatgcctgtggtcccagctactcaggaggctgaggtgggaggattgcttaagcccgggaggtcaaggttgcagtaaactatgatcgctccactgcactccagcctgggcaacagagcgagaccctgtctctctctctctctctctctctctctctcacacacacacacaaagagggagacagcagggtggacaaaagccagaggtgcatgcactctgaagacaccaaccagcggagtctgagatcagagggaagacagagccaaaagccaggcaacaaagatgagagacataaaacaagaagaaccgtaactggaaatctcagaagcccacacacagctgggaagtgagactccaggcctaaggcagatcggcacagctgtcaacctgccagatgctggccttagtggggctcaccccagccccctcccgtgccttccactaaggcctgctgtttcctacctcaacatcagggggccttggttcccccaggccagcgctcacggagggaagaggcggtgacaggaactgcaaacccctcagggactcggcaaaggctatctctcttaagggggaccccagctcatgcctgccaggcttctgggcaggggtctcacattctgtgccctccagcagaggctgttgaagctcacgaagactagggctgtccatggctttggggaaactccaggaggggtttcctaggggtagggggaagaaaaagacaagttgtaaaagtctcacttcactcaacctctgaccccttgctttagagagactcaggcagagactagttagtgcagtggtcctcagacccattttacagatacagaagctgaggcccagagagaaaaaaagattggcctcaggttatgaagagaactcaggggtctggacattcaattttgggcatttctctctctctctcttttttttttttttttttgagacaaagtctccatctgttgcccaggcagatccaccactgcagatccgctagagtgcagtggcatgatctcagcacactgcagcctccacctcccgggttcaaaccattctgcctcagcctcccgagtagctgggattacaggcgcccaccaccatgcccggctaatttttttttttgtatttttagtaaagatagggtttcactgtgttaaccaggctggtcccgaactcctgaccttaggggatccaccagccttggcctcccaaagtgctgggattacaggcgtgagccaccgcacccagccaaattctgggcatttctctcaggcaaaagccacatacccatcacacttaccccaataagttgcagcacctgttgcaccatgccttacacacttacctgccccacaaacacccccaatatccatcccaggttcataccgcgtgaccacctatccaggcccaggcacccctcccagtcacacacacacccatcccctacccccagtgctgcctggaactgcactctagtctacattccccatcctctgtcccctagacctgccccccgaagtcccctgccacacagccccatctaggcaagcccagcctccacctccacacattcatctcccaaaggactccttgaatatttgccccaaaacatcagctcccagaaaacacccctttcaggtccccaaccttcttacacatttatcccaattgactccgtgcacaaccctactccccactgcatcacaaaccacagacacctgtgcacacacgcacacatgcaccccggcactctctcctattctcatgacctctggcatgcctgccccactcatcaggcccaggcacccctgccctactccacccacacacctatgactccacacaactcccacacatgcaccagctctccagaatcctttgcacacctcgcccccataaacaccctcaaccccagcacacacatacacgtacacacgcaacacaaccagaaagaatattcttcttctcgtcctacgatccccctggaaggtccccaagcctcctgcctgctcattccaaaccttgactgagccgatttcctcgccaaagctttgccctctcatccccaactccaggacccagggaagggactgtgacccccacccacctacgtccctcactcaccgctcacgatcacaggccggggcttcctgaaccctcgcaatgacacttgcccggaccctgccaccgaggatccaaggggcgctgggaccttgcgctttgctctacgcgggtctcagcgccccgggcccgctgcgcgcgggggcggggacggggcggggcgacggcttcccaggctctgtccctccgcggcgtccggcgagggatccctgaaagccgacgtcagcgtccaggaacgggttcctacgactcccgggggtctgggagcaggcg

SEQ ID NO: 883 - DNA, 133 bp, Homo sapiens
ccagctactcaggaggctgaggcaggagaatctcttgaacctggaaggcagaggctgcagtgagttgagattgcaccattgcactccagcctggcaacagagcgagactccatctcaaaaaaaaaaaaaaaaa

SEQ ID NO: 884 - DNA, 31304 bp, Homo sapiens
tgggagactgacatttaaatggtttatctgcatgattaaattaatcacatttccaacagtgcatcaagcatctgagaataacattattttgagtaaaaacagaaactcttcgggagagaccccctccccacaggtcaggctgctcaaatgtccaccatgtctagcagcgcagagagatggagctcagaggcaacttcctcttcccttgaactccggatcagcctttccaggtgctttagtcgttcgcctagacacgttcctgtcgcctctgacagctgcagttgctccctcatcatgtcactctatttgaataaaaaagaaactgaacagttttgggatgtcaataaaccacgacctatctctgggaaggtactagatctggatcatgttagaaacctcatctgagtagtcatttatttttacagagggaaaaaaattatcctttgtatatccttccagcctcatttagctcgtacattcagctggtatctgtatatagactgtttgcctttgtattctatcatgaacaatttccagtgtcagtcatttttcacccaggctggaacgcagtggtatgatcggagcttactgcagcctcaaactcctgggctcaagtgatcctaccagctcagcctcctgagtagctgggacaacaggcatgtagcaccatgcctggctaattatgtactgtagagatgagatctctttatgttgcccaggctggactcaagctcctggacttaagcgatcctccctcatcagcctcccaaagtgctgggattacaggcatgagccaccacgcccagccagtcatttttagaaaatatcatcgtcaagggctgtgaattattctatcacatgaatgtgttataattgtttaatcagactcccatcttcggatatttattctgtttcgactttcatacaataatgctacagtaaacatttttatacattaatttttggggaatatctggtaggtcagaattctttaggttagaattggtaattcaaagggtatgaatatttttaaagtatttgccaaactgatgaatggaaacagtacatcattttaatttgcttttctcctctattgaaggacttcctaaagccagtccaggagcacagtttttacctgttcagtggcacatatctgtgattgaaactctgtttttgcatctttaaccactgaaggaagaatggtaaggtaaaaagaccttaggctttggagccagttggatctggctttgaaaagcaacctgaccactcactacttgaacactcttgggtgaggctcttgacttctgggagcttaccttcctcattcattagttttcctcaggaaaaattaatcccagaagagaggtctgggtaatgccaaagctcagacaatatgtgctccaacagaagctgctgtcatcaccttaatgcccttaattacacatcagcacacagttacaggtcttattcagttcttaagaatatttcaattctattcttcatttatttcgtaggcagaaactcaaaatcagttgggtctctttaacaatgatatggataaagtttaagaaaaggtctaatttgagctaataatttgtcggtcatcaaaacatcataggataaatcgtgatattacttttttccccagccattctctcaatctttaattcttatgtaaatgccaaatgtatacgttcttctcacctgtgggctagtagttacagatgttttcatcacaggttcaatagtgtgagaaagagacactagagtctgaggaagatagaggggaagggaagttaaatccgtaaatgctcctgagtcttcagacaaccattgctgaagctgatcttcaaacctgaaacaatatgtaataaattcaaaaatatttgagcattaggaagttaactattgttcattaatcttctatatatacttaaaaactttttaagcctttgcttttttaaaattttatataatttttttttttttttttttgagacagagtctcactctgttgcccaggctggagtgcagtggcataatctcgggtcagtgcaacctctgcctcccaggttcaagtgattctcctgcgtcagcctcctgagtagctgggattataggcaagtgccactgtgcccagctaattttttgtacttttagtagagatggggtttcaccatattgcccaagctggtcttgaactcctgacctcaggtgatccacccacctcggcctcccaaagtgctgggattacaggagtgagccactgtgcttggccaattttattattatttttttttgacaaggtctcgctctgttggccaggccggagtgcagtgttacaatcttggctcactgcaaccttgacctcccaagctcaaatgatctcacctcagcctcccaaatacctgggactagaggcgcatgccacccagctaatttttgtatttttttgtagaaacgggattttgctgtattgtcaggctagtctacaactcctgaactcaagtgatgtgcacacctcagcctcccaaagtgctgggattataggcatgagtcaccacacccagccttaagcctttgctttttactaagaatataactaagttatgacatcaactgagaagcagaaatgtacttattaaaaatttaacaacttcctatgataaagcttaatttaaaaaaaaaaactaggctgggctcggtggctcatgcctgtaatcccaacactttgggaggccgaggcgggcagatcacctgaggtcaggagttcaagatcagcctgatcaacatggtgaaaccccgtctctactaaaaatacaaaaattagccaggcatggtgacacgtgcctgtaatcccagctacttgggaggctgaggcaggagaactgcctgaacccgggaggcggaggttgcagtgagccagatcacgccattgcactccagccagggcaacaagagcaaaactccatctcaaaaaaaaaaaaaaaaaaattagagaaaccacttccctttaatttataaatccaattccaatttatatttaatgaaaaaggtggtattaatccaaaaacaactgcttcgatgtgttacttaacattacttgtaattgtcttgtttggcttatcttatttaatttactttggttttatgcatctataattaattcttctgacattttccaaatgagtggattgctgcttatagcttaaaattaactcaaaataatatcccactgccacctaacatactctagagctgtctacttccatataccggtcttttcaagaaaaacaatcttggccaggtgcagtggctcatgcctgtaatcccagcactttgggaggccaaggcaggtggatcacctgaggtcaggagttcaagaccagcctggccaacatggtgaaactgcgtctctactaaaaatacaaaaatcagccaggcatggtgatgggtacctgtagtcccagctacttgggaggctggggcaggagaactgcttgaacctgggaggtggaggttgcagtgagtcgagattgtgccactgcactctagcctgggcaacagagcgagactctatctaataaaaaggaaaaaaaaatctcatcccaaaccacttaaattatagagactgattttagtaatcggacacattcattcacccttccaaaacatattcattaagcctcctccagatgctaggcatcattctaggtacaaggaatattgcactgaaacaaaacagaggccctgccctaagcaatttatactttagtgaggagagacagacaaggaacacataacaagagaaacatggtttgaagatgagaaagacaaagcagagccatggaaacaagaaggtcggagatgggcaagcagggcctaacagaagcagacatttgagtagagatctgaagtgagtacaagatcagccatggggatgctggggagaatggaggggctggacagtcctaggcaaaaggaacagcaaactcagaggcccaactgtgaactgcctaccatgctcaaggaaggagcggaggtcagagaggaaatggggggcagatcactcagggccctggccacccctgcaaagtttgcctttgattgcaggtgaaagagggaaaccactgagaggctgtaagcaagcaagtgacacgacctccatcttaactcacttgaaaggcacccaccaggtctaccaagactaaactgcagcctactgtaataatccagaaggaagatgatagtggcttgagccacgtggtggccatggaagtcataacaagtggtccaattctgaatgtattttcaatagagccaataggatatgtgaatgggctgatgtgaggggatgattccaaggcacctgatctaggcagctggaaggatggagccgccatcaacagagatgaccaccaaaggaaggggttggttggaagaaagccgggaactggatttgggatatgttaactttgcagtggctaccagacatccaataggtgtctaatgaagatttcaaggaagcagtagcatgttcaagtgtggagttcagaggtttgagatacaaatttggagctgtcagaatagtgatgttacttaaaaatccatgaaactggatgaaatttctgaggagtaggtacagacgatgcagaggagaggttgagagaatgaatccagggggcagctgggggatgaggaggaaccagcagggcaggagggggaccacggacatcctaggagcaaggaggggaggatcaagtatgggatgctaccaaggactgggattcacggtcatgttcaaccctgggccttcatccccatgggaaagaaggctgaagaagtgagtatcacaagcgtttttgaggagttttaccattaagagggcagaaacatgaagtggtggctaaagagggaagtgggaccaagacagggaggcatgtttcatgtctgtgtgctgctgatgggcaccacctaatatggggaggggtggtagcacgagagagatactcattgaatgaatgtccttgggtaggtgggagatgagatcccagcccagggaagggctgactgactacgagctgcatggttcgtttccagcaacaagaggcgtcaggaaggggatatagggaggatgctggatgtggctgggagggcagggaaggcagaggacaacctgtggaaggtcccttattcctgattctactcagtaaaatggtaaacatggccatcaaatgaaagcaaaggaaaggtatgcatgggagggagggaagtgggcaatgtagaggaggggcagccccagctcctgtccattcacagcatgggatgatccaccaatgcctcaggctcccaagggcagggtgcctgtggccagccatagtgttcagcactcaccatcttctgagcagacttaaccacatgaatttcccagaaaaacttaacactgactttcaataataaataataaatgaaattcacttcaatataaacagttagaaacatactatctagggcactgcttctgtcttcaaagagcttttaaatagttacatcactaaaactgttgctaataatccacctgcccttctccatcctggctgtcttatattaatcaagcaataaccagtctcccctcacagcataaagcagactaaacacacatgaattagaaggaagtgggcttcacctcttgttctcttctttctccagcagcagactgctcgacaaacactgcgccaagagctcctcagcagaagctcctcgcatcagatcctctgtgctgggaatcctcccctcttgagcacactctgtgctcctcttccagttacggtgcatgtgaagcaatggtatgggaaaattgtttgcagaaggatgaaaaggctttattgccaaactgtaagtacatgatttgaaatgtttatggtcaagagaaaatatttctacagcatcatgtaaagcatgtagatacatttgcacatgtgcattaacatgtaagaacatgtgcctcagacacatgtgccctcctggaacagctcatgctggccccatgcctgcttccaagcttccatcaagtcagggagtggagcaaagagggaaggcagcccctgcactgtagggacccttatgcacagaggcattgagactgcctgttcctcttggaagcttctgctctcaagaggcagctaggtttttggagcttctctgcttcatgtcttgcttcccaccctagggttccagattctgttcttccctagtattggcaaggttttttatagatagctcttggatacatttggaagtaatgtttacaaatggtgagagagaaggcatctgacatttttttctaaacacatgccaatgtttgtcttttccccactaatttcaataatttggcctaacacttttgtcacatattctgactctttattctgatccatttatctactctggcatccccacatggttttaagtactggagctttactgtatgtcttggtatcaggccaagcaaaccatgttagtcttatttaaaactttctcagcaattgatgcatatttgtttatcctgatgaattttagaacttaccagtactgacatcttcacagcattgtatcctgtcaacaacctagtctgaacctcaatggttcaggtttcctttgcacatacaggccctgagaactcatatgttaatgagaaagacattccgggaaaccaggaggtgaggagaccaaggattaggctccactcctattatgaagatgaacagtttttagagtatcatggagttggagaaggtacttcaaggatctctatggggaacaagaaggaacagcaaagttccaccatcctgtgccctttctgttcaggtttattgttgtgaatgagaatttttttttttttaacatgttgtggatctatctatctgatcaccttattgaactgagaatggttctatggacttgacttttcttggactgacaactgtactgtctggaaatgacagtttctccttcctttcagtatttgtgcctgtctatcccacatccctgtactggtcaggatttccaggacaatagtgaataatagtcgggacaacaggctggttctgattccactgttcctaacattctaccaagaagcatgttttttttctattttggtagttttatgttaggtagccttatcaagttaggactttttttttttttaacccaagctaaagaaagtacccaaaataaagaaattttatcaggaacaggtataaattttaagaaacgtatttcaacgcctgctaaaattaccacttatttttctattatggcaacaaattacattaatagattttcactgttattgtttatcctgggagaaagcatacttgtgaacttttttaggtactgtgctttggaaccaaatttggaagtgagatgaaatgtcagctgtactctcctggttaggtatgatttcagggtcaggtatgcctgataaatgaagtgagatgctttaactttgttctagaatagtttctactgcatgggaatgatctgttccttgaggatttgtcacagtctgcccacagtggactggatttggcatgtaggatgttaatttctatttactttgcaagaaaaatacagtttagcaagcaacagaaacatactgaacatgaacctcaccgtccctctctcagctgtagctccttctgcgtctgcaacctggcttgttcccacgacaaaggaacatcatattttttcaaatcgtttttaaaaaaatacacacatatctgaccatcttcactcagcgcctctgagaaaacaatacaaaaacagataaagaggccagcctggccaaccctgtctcaaaaaaaaaaaaaacacacacaaaaaaacaaaaacaggtacaaataatatttaaacagcgacaggtggcatgtgcttaaattcactgatttaagtgcaagacctttgattaaagtcacacaattatgtgacttccacacttgggttaaataggctcccagggtccatgcatcactcaaagtccagacaagcttacatcgagactggcagggccagtaatgactactcaaaagccacaaaatcctctctaagagccatcctagggggcctgtttcagggaggtgagttcaggctctaccagaaacttcctagcctgtctcaatgtttttaagtcactcacttgaagagggaagtcctaaggaaaggaaggatagagacccaaaagaaaagcagcaacatcaactaaacatcttcctttgcagaaactggaccaggaaagtctcgtgaggagctgatcccattgcatcaagctctaattacctgatgtaacaggaagccgggggggcgtccagtctctcagcttgtggttgatacacaaggcgataagatcatcccatgggatctccatgaccgaggggcctgccccatggactggggagggactcttgctcttccacctacagtaggttctgtggagcaggttctccacctgggactggaggacaggctgtgtctggcgtgagctggggatctgggaggcgtactggacaaccatggagcacacggggagccagggggctggggagaaagtgcctcattagttacaggtttggccaaaatacaggtgaaaatgtacatgaaaacattttctcaggagaaggcaactgtgaagttgagaagtctgctttctaaacacagcagaaccacagttgttgagggggaagagcagcttgctcccagggtctaggtgagggatgcagacagtcccccttaacagtgttgctagccaagttctacccagaagttctgactgtacaggcctgtggttgtgcctaggaaatctgtattttaacaagcacccagatgagtctggtataagcagtcttagcttattttggggaaccccaacctaaccagagcaccgagggcttgtgctgagtggtttgcttccctttgggttccttcaataatgagcatgagttagacctactacagaccacacaccacaatttagaagggcgcctgaggcccaaaggggagtgtctgtgctaatgccacaacttctgccagataagcagctcattcccttctgagtgcataggaaggagcagccccatgccatactgggcttgagccagccagatggcctgtcggatctgtgtcaaaacagcccaaagacctcagccaggaacaggggcacagccagagccatagaagaaggcctctttgacaaagaaagaatgttaaatcagcactgagtgccatggctgcggcttggggacagggctacatggtccccatgctctttgccccttgtctgttctgaaaacagggaccctgtgggcaggcaggacaggatcagggttggtgttcctcccagtaccacttgtcacttttctcctgaagctgagtgaactcccatggactgccttgctggtcaggaaaggctaacagcccccactccacaaaacccagcttgttctggctcatgaacccaaaggaccaaaggaaggtgcaggcgagcacagcatggagacacacggaggtggacgtgcagccctcacactggtgcccaacacctgccagacggttactacagtgagaaggaagcctgagacttggctgcagccacccaccagacctccccaggtcaagcacgtaccccccaggggtggaaggtccatctgcggaagctggaacccgagcacagcctgcttcagccaggccaggtgctctggggcattccagtgcaggtgaggaagcagccggctgccccctgcctcagcaaactcagtgacaggccaggacaggtcacacagctgttcagaggacaccacagaagccaggaactgcagcacactgttaaacagctcaatgatggcgccaggctcctgagaagcaagaccgcccagacgcctctctcttctgtcatggaaaaagcggccactaaactcatggccaatcccgtcttcgacgtactgaatgagagtctggcagcagaggtcaagggaatgggggcagtgggaaaccagccactgcactgcttgcaaaacctgagaagaaagaagagacttggttgaacaattcacactgtttttcaaaaacagctttctgaaagggcttgatcccccaaggttgcccacagcaggtaataccagagtactgggctctcaactgtggtaggaaggggaacagaagtgtcctatgcagttgagtttagccttctagggctctggagacatgtccagtaggggcactaaagagagcccccagatcccacctggcctgaggaggagtgtgacctgcatggttgccccatggaaaggcccaggccctcaggaaaccagccctgaacatccccttcaccatgcacagaaatggagtcttctcctttttggaaggactaacagcttcactatgtgccaaggtgccttcacaccctatggttatcttacttcctatagttattttaattcctggcacctctttctctaaattgttagcaaagactccccctgccctattttttttgtttttgagaagggggtcttgctatgttggccaggctggtctcaaactcctgagctcaagcagtcctcctgcttcagcctccgagtagcagagactacaggtgcgaggagccaccacgcccagcttcagacttcctttttaaaggaaacatcaaataacattatttcttcatatattcagaggacaattaccctagaaaaataacttctgtatctgaccttcagatataagacatgttcatattttaaattcatagaaacaaaaacactaaaaaattttacatgaacaatttaatttgcagatagcaggactgtgggcaaattttatcttttattttgatttctgcttatgtttttagaaagttatctgtataaaacatacaactgctgccaggcgcagtggcacaccacagtagtcccatatacttgggagactgaagtgggaagattgcatgagccctgtagtttgaggttgcagggagctatcatcatgccactatactgggtgacaataaaaccctgtctcttaagaaaaagacaatgcaaacgctaatatacactcaattcaagatacagcaaaaggggaaaaaacaaaatatcttgacagaccattaaaaatgatgaaaccttaccttagttgaaccttgtagatcattaatggtatcagggatctcggtaacagtgtaatctgaaatcagcttagctgaaaccaagtcctgtagcatcagacctttaagacagacatagatgaaggtcacttgcattctgctgtcagcacacctgctaacatatctcactgtgctgaccccacccagtcctgcagtggacagtcaccacaggggttgctgtctcagtgattcctgaccccaacactactggaccatcctcagacccagggcctccacccatttattaaacaatgctgcttcataaacgagacttccttcacaaaccatcttctacttccttctcaacggcgtcccctcctgggctaggcacaagaaccaccagaggaagcgcaggctggaagggcttagcctgcaggagctgcttgagctgcagcaaggccgacagccagtacacgtcctcctctgccatgtcctcactcttcattttggggggaagcagcagcatgagcccactggctcccaggaggtccttctgtgtctccacagcatcaatggcaccatcactgagggcgccatgggccacctgcaacagcatcaagatcatcaggagagatgcaccatgggacgcatcagcagtgactgatctgccccagagcaagtgcagccaaagctctccgtgcactaaatactgactgtactccagacaggcctccaagggcacagctgggcataccctgtagttatcttacttcctgtagttattttaattcctggcccctctttccctaaatccaattgttagcaaagactcccctcaacctttttttttttttgagaagggggtcttattatgttgcccaggctggtcttgaattgctgggctcgagcagtcctcctggttcagcctcctgagtagctgagattacaggttcgaggagccaccatgcctagcttcagacttcctttttaaagaaaacgtcaaataacattgtttcttcatatattcagaggacaatcaccctagaaaaataatttctatatctgcccttcagatataaggcatgttcatattttattttatttttatttatttattttttgagatggagtctcactctgtcgcccaggctggattgcagtggcacgatctcagctccctgcaatttctgcctcctggatagtagctgggattacaggtgcccaccaccacacccagctaatttttgtatttttaatggagacagggtttcaccatgttggccaggctggtctcgaactcctgacctcaagtgatcagcctgcctcggcctcccaaagtgctgggattacaggtgtgagccaccgcgcccacccatgttcatattttaaatttatagaaacaaaaatgagaataaatgcaacagaattagtgcaagaaacagccaggtcaacaggtaatttagcctccagctagaattgtgtttgaccatattactataactttaattaaccttaaacaggtataaaaaagttaaagctaggcacagtggctcatgactgtaatcccagcacttggggaggccaaggcaggagaactgtttgaggccaggagccaggaattcaagaccagcctgggcaacatagcaagaccccatctctacaaaaataaacaaaaatataagcccataataatagaaagagggaaggcaagccagcagcagatgagggattctgatacatttctagaaagcagcaaataggtgtgaccaatccctgggttagggaagcagaggatgccatacctaaaggctgcagatgtgggtgtgtaaggagtcaggttgactgagcctgcaaaagccctgtatacccaggcgctgcagacaccaggagccaaaggtgaagttcagagcctgaccctattggcggcacccaccactgcaggcaacctctatgcaaaaccagtccccctgggcccctgaacaggagtcctgagaggatccagatgcagggccatggtcaggcacagtggaagggactcagcgccaaaccactcccaaccctaccctgagaataccagcagctccccagaaagcagatggcacaagtcctttccagaaaaactgaacagtctagggaacagccatccagatccagacatttgggagtccctccaaaaagcctggcttgccatttagctaccatccaccccaccccaaacacagaacttcttggctagccttttagggcctcactcagatatagacagatagccttgggtaaggcatctgaggagggcctccaacataaaagagataaactggagtaacagagaggaaaaaaaaaaaaaagaggaaccagataatacgtgaaccaaagaaaacttagaccccaaaaaccctaatttccttggaaagataagatgatgcatccaaaaaataagatgctatgaaaaagtcatgataaaaagaaagaggaaataagtaatatatatggaataaaaaattcagtaggacaattggaaaataaagtcaaggaactctttcagaacacagtaggaagagatgagattgaaaataggatagaaaataggataagaaactcagaggatcaattgatgaggcctaacatctatctaatagaagttcaagagagaacagaaaaaagacagagtgtcataaagacatgaaaatgtcccagaagtgaaataggagtctctagcctgaaaggacctgctaagccctgcacagtgagtgaagctagtccagtgccagtgtaacaaagtgaatttttaggacgccatgaacagagagaaaaggcttccacagagaaaaccaggccacacagaaaggaacaggaatggtacagcaacaatggatgctaggtgacagtggagcaaaactggaaggcaaataattttctttcttttgagacggggtcttcctctgtcaacaccggagtgcagtggtgcgatcacggctcactgcagcctcgaactcccaggttcaagcaatcttcccacctcagcttcccaagctactagaactacaggcacacaccaccatgcccagctaatttttgtattttttatagagacagggtttcaccgcgttgcccaggctggtctcgaactcctgcactcaaaacaatccgctcacttcggcctcccaaagtgctgggattacaggcataagccactatgcgcggccaggaaaataattttctacctataattttacaaacgtagctaaactatgaagcaaatgtcagaatgaaataaatgcattttctttttctttcccccagcttaaggtattttgttaataaaatcattttcataatggaaaagactcagaaaattcccctcgcatgacatataacatccaacaaggggctgaaccaagaaaaaatactgcagctgctgctaatggcaacactgagcaagcacctggcctgtgccaggcactgtcctgtgcagtctgtgtttgcactcattttatcctcaagagccagatgagcatctccaccagacagcacctgcagaggcttgggcagtttattttaccgtctctgagtaaaatagggataataagtaacagtacccatacacaggtggcagagacgctagggaacttgcccaaggtcacagagcttccaagtggaggagcagggacacatatgctcacaatgatggcactaaggcacatgttgcctggatggagaccagcccacagatgagagttccaggacagagggaacatggatggatcaagtgaagtgacagaacatttggaaaactctaccgagatatatacggccccccagtaaaattaaagagataaagagaactacattaagtgagacaataaggcaactctatttcttgcaggaaaaaaataattgtggttatagaacactactggttctgaggtgaatagcagtcacagagccatcaaaatatgaccccactcactgaagtaatacaaagtgctagtgtagctatcccgggaagacgtggaaggccgagcaaggaccatggcacaagaggccacgctgtacctagtatggtatgcagtggccaagaggacccccctgattccacctagtgttcatgcccacgtgtgatctcctgccccgtgagctgggcctagccactcacttctgacagacagaagccaacaaaagcaacaggatgtcacttctaagtttaggttataaacacactcagacttccatctaggctcacctcttgctcactctgatgaaagccagctgccatgctgtcagctggggagaggcccatgtggcaggaactgaggaagtctttggccacagcctgcaaggaagtgaatcctgacacaagctcactagagtgagctgggaagtagatacccttcagtcaagctttcagatgaggccacaatcctagccaacattttcatttccacccatgagaaaccttgagccagaagacccaagctaagctacacctggattcctgacccacagataccatgataacagacattattttaagctgctatgttaggagtaattagttatttaggaataaggtaactaatacatttatattaatgggaagtcagcagagaacatttaaatggataaactgagaaatggctgtgtaagtgtgtgatctggaaacaggagaaaaatgcagccctgaagaaaggagttaagagaggaaggaggagctactatgtctcattttaaatcacgtgggtggcattatttgacttctttttaagtacacggaagtgttactttcttaaatgaaaatgaaggtaacagcagcagtaaactaatttccagtagatgaaatgtgactttgtaatcccaggaaaagggaagaatttgcaccaagaagttactgttacctcagaatggcaagagcatggatggctcttatcatcatctttatacttcttttacatttcctcattttttaaaagttttgtgtacatattacatttaggaaatccaatatatagtattaaaacagaaaaagtaaagaagcaggctgggcttggtgcccactactcaatttgactggcttaaaaaaattttttaaacgacatgtacggacagacataatacttgcttctgagcctcccagtctttcaaaaccacattagggaataagcagtatttgcatggttccagtgatatctgggagtaagtgaaagtaatgaaaacacagaagtaaacacaaagtaattatagttcacctttatacacacgttaacagaaatcatctgatcccctttgctgctaagtgagttgaaaagcgaaagcgtctgaatcccaccagcatcgctggatgtgtcatccactgagccttcatctcccatgaacttgacttttaaccaatttgctagaattctacagatttaaaaaaaacaaaaaacaaaaaaaacacttgaagaatctaattctatatttgaattataaagactttcaggaaaagaagaaagaaaaatatcacacagacctaggtccacaaataccacatcttactatgaagctgatctgcacaaaacaggctgttgttttaaaatggagcaacgatctgtactcgttcttttttttttttttttttttttgagccagggtctcgctctgtcgcccaagctagagtgcaatggcacaaacttggctcaccgcagcaagcaaacctgcctcagtagctgagactacaggcacgggccaccatgcccagctaatctttccattttttttgtagagtgtcactcaaagggtctcactatgttgctcatgctggcctcaaactcctgggctcaagcaatcctccctccacagcctccccagttgctgggattacaggcatgagccactgctcccggcttctacttgttcttaattgggcaggaggagggggcactccattccattagaatggaactggctcattctaatgtgacttaaaattctgaagcattaagattttcagcaatagaaaacatccctagagtttgaaatacatgttttttacagatcaaatttctcatacctgagaccttaagaattcttaagtgacatacgaacttagcaaatgagaagacagctattttaagaaatgactcaccagctgggcgtagtggctcacgcctgtaatcccagcaccttgggaggccaaggcaggtggatcgcttgagcccagtttgagaccagcctgggcaacatcacaaaaccctgtctctacaaaatatatacaaaactaagctgggcgtggtggtgtgcgcctgtaatcccagctacttgggaggctgaggcaggaaaattgcttgaacctgagaggtggaggttgcagtgaacaaagtgtaccacacgccagcctgggcgacagagtgagactccatctaaaaaaaaaaaaaagaatacaggctttctaagtgaaaaggtgttctggaattattaacagtgatggttgcaaaaccctgtgaatatatctaaaaatcactgaaatgtacactttaaatgggtgaagtttatggtatgtgaataacatttcaataaagctattttaaaaataaactgtaagccgggtgtggtggctcacgcctgtaatcccaaaactttggtagactgaagcatgcagattgcttgagcccaggagttcaagaccagcttgggcaacatagtgaaaccccatctttaaaaaaaaaacattaaccaggcatggtggcacacgcctgtagttccagctactcaggaggctgaggtgagaagatcagttgagcccaggaggtcaaggctgcggtgagctgttatcacaccactgccctctagcctgggtgacaacaaagcaagaccctgtctcaaaaaaacacagagactgtagttgctttaaaaatatgacttctgtatgctatgtggttacagaaaataagatcatgtcaattttttcttttttaaaatgccaaaagtttctttaaggggaaaaaaatggaactatagtaaacagactataaactatcttactgaagagtctaaaatgaagcaggtctatcaatgtaccttaacacagcttgaaataacaatcaactcttaaatgcttttggtctaagactgttgccaagtaatatggtttggatttgtgtccctacccaaatctcatgttgaactgtaatccccaatgttggaggaggggcctggtgggaagtgattgtatcatgggggtggaatccccctggctgttctcatgatagtgagctctcacgagatctggttaagtgtgtgacaactccccctcactgttctcatgatagtgagctctcacgagatctggttaagtgtgtgacaactccccttcgctgttgtcatgatagtgagctctcacgagatgtggttgtgtgacaactccccctcactgttctcatgatagtgagctctcaacaagatctggttaagtgtgtggcaactcaccctcgctgttctcatgatagtgagctctcaggagatctggttaagtgtgtggaaactcccccttgctgttctcatgaaagtgagcctcgcgagacctggttaagtgtgcagcacctcccccttgctgttctcattacagtgagctgtcacgagatctggttgtttagaagtgtgtggcacctcccactttgctgttctcatgatagtgagctctcacgagatctggttaagcatgtggcatctcccccttctctctctcttcctcctgctttggccatgtaagacatgcctccctccccttagccttccaccatgattgtgggtttcctgaggcctccccagccatgcttcctgtacagccgagccaattaaacctctttataaagtacccagtctcagatatttctttaaagcagtgtgagaacggactaatacaccaagtttatggaataaaaattgaaataatcaaatctaaagtttcaacttaaaatcatgagcaaaacagactgtaaatccaagcattaaaacataaacctacacttccgagttcccatcacacataagaggaatacccggccctggcccacaaccctgccctgcccactccacctcttggaaaccccacaggggaaaacccttcctgacctgccacaactctctggggactgctcctctacatccggcaacaccagcaccagcttccaaaacacatgctcctgcctcccagggaggtgctcagccacgagggatggcaggtccagagacgcccatgccacatcactgggaggaacagaccaccgtggattagccagtgtgtgagacccttgcaggagcagcacacacatcctatgagcaggaaggggcaggttggaggaaaatcaggttcagagattgaactgcaaactagaaaccaagtctggagctcatcgaagagacctcagttggagatgcatgaagggggctgccagtgtgacagattggggaacggggatcaccagggggtgcgcagaagggtgcagcatgacagacctcagcagctgctggtagaagtgctgaaccttcatctggtgagctgtcttgtttctgagccgccttaacctgcaaaggaaagcagaatgacagtgtccccgcaggagcttagtgagaagtactggctagtgtcccctggggaatactcaggagactgaaaaacacattttctgccaatgaaacgggttagaggattccttcattccacaaatatcatgttaagtatccactgtgtgctggctatgggagattcagcaataaacagacaaaatcctgccctttgagaacataggctctaatggggagagaacagcatctctaagtggctggcctggcatgtgtgaggtgtcggcactgtgggcaaatgctgccaggtggggctggagccaggcagggtgcgtgttgcagtctcactcagggtggtcaggtgatatgtgagcaaagacctgaaggaaacagggggagccagcgtgacaacttctggaaacagcagagggcatggctatgccaggccatagctggacctggtgtgtttggggagagcagtgagggcagcgagggaggggttgggtccacaatgcagagactcggggagcgctagggacgccgccgagaggcaacgccacctggctgagctgttggaggatccctctgttgtggtgctgaggacacgattggggcccagggtggaagctggcagacaggtgctgcagcaacattccagtgaggtggagagaactgccatgccctcggtgctgggtctgagagagatgcaagcccaggtttgtgccctaagcgcaggaggacaggacggcatcctatgagcaggaaggggcagggtggggaaaaatcaggtttagaggttgaactgccaactggaaaccaagtctggaactcagggaagaggcctcagttggagatgcatgatgggggctgtcagtgacagacaggggtgacagggctatcaccagggggtgcgcagaagggcagagggcagaggtctgggctgagggggcagggtggagggctcagacaaggagactgaggctgacaagggcagctacggaggggggacacaagaagccatgactccaggagaaggccaggtcactatgtgaaggcagccatgggtcagaggagccaggcccagccctggcctcacagcatgcctccaacaggctgggactgccaccccactgccggcgcagaacctgatggggctaaatgaaacccacaagacagttttcagagggaacatccagtgatgaccaggaggaggacaagacatgacatgaggccccagcggtgtgcctgctaggccctccaggctgcctccccagtccccacccactgggaggccagggagccctgaggccaggcaagaggtggcacctacatgggttctaaataaaggccaagcccagcatggccaggaatgcaggctgaggggggtcctggcatggccctgaggagccggttctgctcggggtaaccaggaggagtggcagggaggaccagggccacaccaaggggcctcaagagggaaataatggagggtggaggtggagtctggaagatgctgccacagaaagggggcagtgtgtgaaggagacggcgggaggaacagagggatggggcggggatgggatcggaagacacaggccagcgtggacctccggctcctccaacaaggatggaagtggcaggtacttaaactgggacgagcaggaaaagaacacgtgatgcagagtcagactcaggcaccaggacgctgagtctttcaaggtgaactcagagctctgctttgccagtggaacaagtcacatgtccacaactgtgggagacaaccttcaaaatgcaaccctgtgcctgtcctcgcctccaggcttcacctatcttcgcctccaggcttcacctatcttcaccctccaaacacacacattaattccgctcctggtaaaaccaagtgggggcaggggagccctgacgaggcaggcgacagctgatgctgacctggtgcaggagatgcccaatctccctgcatggcccaggtccaggaggcccctggccaggttctcttcagcaatggggcactctgcgctgggcgccagcgccctcagccggtcgctcacgtccacgcagcagggcgcagcagggaaagcccgcatttggcgcctcagtttcttgcgggctgtgacagcttccctccacctggggacatgaaaatgtatcatcacagagtgttttcagggtcttcaaactgagaaacacattgcagtcagaactcaggcatggggaaggaaggacatcaaatgagtgtggtgagcaatgaaactaccgaacgttaacagttaatactgaatgagctttggaggctgacttggcaatatggatacagatttaagatacatatacccagctgggtgcagtggctcacgcctgtaatcccagcactttgggaggccaaggcgggcggactgcctgagctcaagagttcaagaccagcctgcgcaacacagtgaaacccaatctctactaaaatacaaaaaattagccgggcatggtggtgggcgactgtggtcccagctacttgggaggctgaggcaggagaatcccttgaacccaggaggtggaggttgcagtgagccgagatcacaccactgcactccaggctgtgtgtaccagcaaggctccgtctcaaaaaaaaaaaaaaaaaaaaaaaaagatacatatatcccttgacccacagccaccactgataggaatttatctccacacacgtgcctgtgtgcaaacgggtgagatgtctgtctgtacaacaacagtcactgcaacagtctttaccagagctaaaaagagctacgtccaggctcggtggctcacgcctgtaatcccagcactttgggaggccgaggcgggcggatcacgaggtcaggagttcgagagcagcctggccaatatggtgaaaccccatctctactaaaaataaaaaaaacaaaattagccgagcatggtggcgcacgcctgtagtcccagctactcaggaggctgaggcagaagaatcacttgaacctgggaggtggaggttgcagtgagctgtgattgcgccactgcactccagcctgggcgacagagtgagactccatctcaaaaaaaaaaaaaaaaagagccacatgaaagtccatcaacagaagaccaggaaggtcatttatggtacattatcgcactgacctcaagaccactggcaacggggacagctcagcatgctgctacagccaagcctccacctcatatcagatggagcaaaggaaggctcagagcaaagcagggatcatgagcccatctgtgccaagagccacaagaaaggacagaaagtctctggatggtttcgcaagcagctgctgctcgcacaatggacaggggtctgttgtagaaggaagactcacttctccccatactcccttttatactgttccaactaccaaggacactattactgattttaaattttattatgaaatgaatcatacaacatacgtaacacatatatgcccagttataagattaataaatcatcaagcacctgtgcacttacacccagttgagaagttgtggccatgagaggcaccacctcccattcccaaaagtaaccactatgctgagattatgatcattattttccttcttttctttagggttataccactatatataaatctgaaacaacctatttagtttgaatatacactatttgtatattccctattaattgctttttctccactacttatattttgagaattcacccttattggtgcatgcagccataatctggcttgttcatagctgtctcccagcacctagtgcagtgggcaaatggcaggcaccctataaatatcagttgacatacagagtagccaccacgtcccaatctaactcctgacttttccccttatattgtatgtgtgtgtgtgtgtgtgtgtaatcaagtatttctgaaatgcagtataatccaattagtctattttaggtattcattgctataacattttccctcatccttttaccactgaatacagaaactaatagctcatatattttgaatttgttaaaagactcttccccgtgtgtgtggattttgcctgtaggaacacaggactcaccgctgtagatacttgcagaagcactgaagctcctggagggtctcctttgcagtctggaagatttcctccacgagaaacaagtccactaagtgggcacagacatcctcacagcaacgggccacacggaccctctggtctgtctctactgcattcctagaaacagggcaatcagcatggaagacactgcacttggggcccacagacactgagggcttgcttgaaaagtgcaagagtcagtcaggcgcggtggctcacgcctgtaatcccagcactttggaaggccgaagcgggtggatcatgaggtcaagagatccagaccatcctggctaacatggtgaaaccctgtctctactaaaaatacaaaaaaattagcctggtgtggtggcgggcgcctgtagtcccagctactcgggaggctgaagcaggagaatgacgtgaagccgggaggcagagcttgcagtgagcagagatcgcgccactgcactccagcctggacgacagagcgagactccgtctcaaaaaaaaaaaaaaaagaaaagtgcaagagtcggccaggcacagtggcttacacctgtaatcctagctctttgcgaggccaaagcaggcaaatcacttcaggtcaggagttcgaaaccagcttggccatcatggtagaaccccgtctctactaaaaatacaaaaaattagctggcggccaggcacggtggctcatgcctgtaatcccagcactttgggaggccagggcaggcggatcacgaggtcaggagatcgagactatcctggctaacacggtgaaaccccgtctctactaaaaatatgaaaaattagccaggcatattggcaggctcctgtagtcccagctactcaggaggctgagaatggcgtgaacccgggaggcggagcttgcagtgagccgagatggcaccactgcactccagcttgggtaacagagtaaaactccatttcaaaaaaaaaaaaaaaaaaaaaattagctgggcatggcggtgcatgcctgtaattccagctacttgggaggctgagctaggagaatcgcttgaacccaggaggcagaggttgcagtgaacccagatcacgccactgcactccagtgtgggcgacagagcaagactccgtctttaaaaaaaaaaagtgcaagagtctgcatcctcagtattaaaatgtaattctatcttcattgtaaaagaagctttaatacttaaactacagacacctagaaagacagggtaaaaagaattaagtggaacagggtgccaaattataggtccataggggccctcgtaacagttaagaaataaacctttatcttaataaaatagtcagaatttttaattattttagagacagggtctcactatgttgcccaggctggagtacagtggccaccacaggtgcagtcatagcacactacctggaacttctgagcttaagtgatctttgcacctcagtctcttgagttgctgggactacaggtgcctggcgtagaatttgtaaattaccatgcagacaaccacaaaatcttctcatcagcaacatctgacttgtgcaatcaattggaagtgtctcaaatatatgataaatgccagtggctaataaggatggctgactatgatcatgtggtggcagccctcatataaaagagaattttttataataaaattctattagccaagggagcacagaggactgcatcaaatacatttggtcacaaaatcaaagtagcttagacaggcaagatccatttccaatagcccatcctcagtggtgcaagacacagcctagggcagagccaaagctcactctcctggcacagcaagacaccagcgtttcacttacttcaactcctgggagcaggtttccctcacaaactccatcatcacgcgttccatcagctccacggccaggccctggctcagctcacttaacaccagctctctctcttgtttcaacctacagggaagagaaaaaatacacaagggtaatgtttaagaataaaaataagtgctgtttgttttactccctggccacgcagacagggattgaggtgtgctgcctgagtcggtaggccacccctactccagctcccctgacaccacctcccttcccctgcctttcctggctgggaagggccactgctcacgggtaggtgtggcctgaggagctccatccaccccctgggctgaagcataggagggcatgagtgggtcagcaggggtggaatggtagcacagtggacaatagcaggagcatcgtggctagggtcagttcttgcctgtgtccacactgagctccttattcggctgcatggacaagacacacttacctttcctcttcagcccgctgcctctcctgctcccttcgctctctttccttagacacttcttcagctgcaatgtgcctcaaaatgcccgtggttgcagctgttaacaaatcctccatagcagcattagaaacactaaacggagcaaaggggatagcattcaaaatcagagtcaaggccgggtgcggtggctcacgcctgtaatcccagcactttgggaggctgaggtgggcggatcacaaggtcagaagatcaagaccattctggccaacacagtgaaaccccatctctactaaaaatacaaaaattagccaggcgcggcagcacacgcctgtagccccagctactcaggaggctgaggcagaagaattgctcggacctgggagcgggagactgcagtgagccaagattgcgtcactgtactccagcctgggcgacacagcgagactctgtctcaaaaaaaaaaaaaaaaagaaagaaaaatatcagaaaaaagccaagtcattgacaagggaaaaaaaacacacaggttgagtgtccctaatccaaaaatctgaaatccaaaatgctccaaaatctcaaactttttgagcacaacatgtcatgcttttcaaaggaaatgctcattggagcattttagaattcagattttcagatttttaggtaagagatactcaactggtacatataatacaaatattccaaaatccaaaaatatctgtcatctaaaacccttgtggttccaagcgttttgaagaagggatatgcaacctgtacttgtttggctgccagcagaaaaattaagcccactgttagaaacacaccatctaccaaaactgactcatgaagaaacagaaaaatgtgagtagacctataactagtaaggagacttccaaacaaagaaaggtatgagaccagaaggtttcactggtaaattctattaaacactaacgaaaaactaaccaccaatctttttcaaatcctttcaaaaaactgaagaggagggaatatttactaactcattttatgaggctagcattgctctaataccaaagacagaccaaagacactataggaaaactacagactgagcaggcacagtggctcatgcctgtcatcccagcatttcaggaggctgaggtgggagcactgcttgagcccaggagttcaagactaacctgggcaacatagagagaccccatctctacaaaaaattaaaaaattagccgggtatggtagcatgcgcctgtggtcctagctacttgggaggctgaggtgagaggatggcttgagcctagaagatcaaggctgtggttagctgtgattgtgcttctgcactcgggtctaggtgacaaagtaagaccctgtctcaaaaaagaaaaaaaaaaggaataaagaaataaaaaggaggccgggcgcggtggctcacgcctgtaatcccagcactttgggaggccgaggcgggtggatcaggaggtcaggagattgagaccatcctggctaacacagtgaaaccctgtctctactaaaaatacaaaaaattagccgggcgaggtagcgggcacctgtagtcccagctactcgggaggctgaggcaggagaatggcgtgaaccccggggggcggagcctgcagtgagccgagatcacgccactgcactccagcctgggcgacagggagactccgtctcaaaaaaaaaaaaaaaaaaaaaaagaaatggaaaactacagaccaatatccctcatgaatatggatataaaaatcctcaacaaggccaggtgcggtggctcacacctgtaatcccagcagtttaggaggccaaggcgggcggatcacgaggtcaggagatcgagaccatcctggctaataatggtgaaaccctgtctctactaaaaatacaaaaaattagccaggcttggtgacaggtgcctgtaatcccagctactcgggaggctgaggcaggggaatcgcttgaatccgggaggtgggggttgcagtgagccaagattgtgccactgcactccagcctgggcgacagagcgagactccgtctcaaaaacaaaacaaaacaaacaaacaaaaaaacaatttaacctaggaggcaaaaactttatacgttgaaaactacaaagcattgtcgaaagaaattaagaatgacctaaataaatggaaagacatcccacattctcagattagaagatttaatattgttaagatgacaatactggccaggtgcagtggctcatgcctgtaatcccagtactttaggaggctgaggcaggtggatcacttgaggccaggagttcgagaccatccctggacaacatggcgaaaagcatctccacaaaaaataaaaaaattagccaggctggtgcccacctgtaatctcagctactcgggaagctgaggcagaagaattgcttgaacccaggaggtggaggttacagtgaggctgagatggagccactgcactccagcctgagcaacagagcaagactccatctcaaaaaaaaaaaaaaaaaaaaaaaaaaaaaaagatgacagtaccacccagaacaatctacagattcaacgcaatccctatcaaaatcccaacagcactttctgcagaaacagaaaaactcatcctaaaattcgcatggtatctcaggagaccccaaatagcaaaaccatcttgaaaaagaagaatgtaggggaaaatcttcctgacactgtatctggcaataacttattggattatgactccaaaaacgcaggcaactttatgagaggaaacttctggaggactgggtgcagctccccgcagcacgtagcaggaggggagcacgagatgccactcaccccagggcggcagctgcgtaggcagcacccgcagagccaacttcctcacagtccctctgcagggcctcctggatgagctcgtccaccacctgcgccaggtcctgtggagagaccagcatggggtgtaatggaacgtcccacccagggcagaaatgctgggtaacatgttgtcaccggacagtctgcaggcgtctcgtgacagaagcacaacccctgacacggggtcggctaggctgttgcaggaaaggtgtcccctagcgaatggaaaggtgccatctggagaggaaggcgccctgcggatggccacacagcgccctggcctagccatctccagtctacgtcaagcagcctctgtttctgtgaccactctatgctccccctaagcactccctgatccccagatgggctggtgcccagtgcctgccccgaagcagccagagtggcacaatccagtctcacaaccatggagtcgacaggctctactcaatatcaaggcacctgtcgggaccatgcccaccctgaggccacaaccatcaaggggcacatccacccccaggccaggctggtcaaggggctcacccacccccaggccatgcccatcagggtgcacagccagagaccacacacaccagaggggacacgaccaccccgaggccacgcctatcagggggcacagccaccccagccatgcccatcagggggcacacccgccaggggacacgcccatcccaggtcacacccatcagtggggacacccaaccccaggacatgcccttcaggggacacacccacactcagtccatgcatattggggtcccatcagggggacatgcccactccaggccacacccaaggggacacacccacccaggccacacccaccaggcggacacgccaccccaggtcacacccatcagggggcgcacaatgctgccaatgatcccgtcaggaatagacgggtgttgagttcagacacacgggctcaggccggtgctgtgacaggaagctcctgagatgaagacggactccagaatgagcctgaataggtgggccctacctgaggctgagtgactctaggcaggacccctctctggactctcctgagagaccaggcgccacagccccacctcatggggtgatgactaaggacgtttgcgcacaatgggcttcccagagtccagacctagaaaaaaagagtccctacctcgtcagagtacatgggcacgggctctggaggcggtggttcaggctgcacagacagctggaagaggctgggcgccacagacggggtcagtgccaggacaggaggcagaggcactggtgagggcgcaggggctggtagagactgtgggagactggacaggggtgcatccggctctacaccacactcctctcctctccctccgcctggaaggaaacatacaggacaaaacatagctgcagacacagggtgcctggcaccacggggaccgaggtctgtgcagggacagccccaggccacccacagtgaccctgaggactggcctgccctccaggagaccagctacgtgggacaacatacgctttgcatgaaaaacaagccccaggatgtcagggagccaggaggagggcttcaaagccctcagtccactcccagtgagaaccatctgagcatgaggaagagccacacccctgggccccaagacaagacaggtgctcaggctcctgggaggcgtcctggcgagaaaatgcagatgcccaggctcctgggaggcgttctggtgggaaaatgcagctagtcccctcactacgactgcagcttcactcacccactgtgtcggagccgggtctctgggtgctgacgggcagctccgcggccaggctctccccgatgtacttgttctgggagttgaagctgcacacaggggtatgacgagggacggggggcaatggccctccgttcacaatttccccgactgacaccgtcagcttcctagtaataaacaccgacttcctggtcttggataatccctctggttccaggaatgcagaccggttcagctccacacagctacccagaccacaaaagacccccgaggggtgtcaccaggggagaagacagcttcgccctcagtgccctgccgagtactgcaagccccttgggtgtcaccacagccatgtgtaaataacagaaagcacaggcgccaggtcccactgccgcccaccctggagcctctgtaggtccctagaaccactaagcccagcgtgttaacagacgcacgctgactcactcctgcctccttgctggctcacccaaaaccgtctaattttct

SEQ ID NO: 885 - DNA, 465 bp, Homo sapiens
atgtaggattacagtcaggagatgctgagtgccagtttaagattggtggtcatacgcaacatcaccaagtctattaatacctctttctgtatatggctcaaattttatcccctctcttcacaccaattgctaacaaactcacgcttattccctttgaatttcacctggatggctgcagcacccacctctcaagattcctgccctacatgccattcttaaaagaaaatgtgaccagatcacttctctgcctaatcttcaacaacgggttctcacagctctcagaagaaggtgacaagaatctctgacctcaccctgctggcctgttcccctcacctggccacacaaccaagctggtacctccacgctttcatcatgtcctctcaagtacactgtctccagctacacccctgcactcctctccgggaattctgtttctcctctacccaaccagaccctgttccatcc

SEQ ID NO: 886 - DNA, 470 bp, Homo sapiens
ggtgaggagttagaggagacagggtggggaactaggcaccgggtgttgagtgtaagctgccagtttctgagagagcgtctgtgagtctcaccactctgactggtaagtaccggagaagactccggctggcctgcgggtgcctccatcccagccgtcagaggttgtccgtcattggctggcaaaggcagtcaagggaaagaataaagaaggccctaacttttatctttaggtttgtcagcaagtcatgaaaaggactgattttggagtcacaaagaacttggtctgagccctcaatgtgctgacagccaggatgtgaccttgggaacacccccagccattctgagtctcgtgtgttcacctgcatggcagagggaatgcaccttcttcaagtcaggcaagcagccagcccttcacagcccttcatcagaattaacaagaaaaaaggagacaggggccccacagttccattc

SEQ ID NO: 887 - DNA, 555 bp, Homo sapiens
aaactagaggtcagcaaattctttcttaaagaagtgtcatataataaatatttttgacttgtgagccatataggttctgttttgactgttgtagttagaaagcagctatagatactatgtaaatgaatggcttggctttgtctcaatggaaaactgtgtttactagaagaggcagccagcccacaggctgaagtttcccagtcgctgatagaaacaattgaatatgccatttaggctaataaatggatttaacctttggcatctcatgaacaatgtcttctgacttacagaacagaaagaataaaaataccaatgcaaggttaacagtgctttgatctttgttccttagttacctattcagttttcatgagtaaatgattataaacaagagttctcttatttggaatatcgtatttcagagctctccacctcactagatggcaattcccgtggtataatttctctcggccaaatacactagagtctttatttatggttcttttctccctcagagcctgtaaacaatatgctagtaaattcttttcatcctgtctt

SEQ ID NO: 888 - DNA, 555 bp, Homo sapiens; identical to SEQ ID NO: 887

SEQ ID NO: 889 - DNA, 555 bp, Homo sapiens; identical to SEQ ID NO: 887

SEQ ID NO: 890 - DNA, 303 bp, Homo sapiens
agctggaactacaggcacacaccaccatacccggcttaatttttttatttcttttagagatgaggttttgctgtgtttcccaggctggtatcaaactcctgagctcaagtgatcatcctgcctcggtctcccaaagtgctgggattacaggtgtgggccactgtgcccagcccatcctaaatccttgaataactttttcttatatcttctaatgcatatgtagaaagacatgctactaatctgaattctggcaagatattcttggtcacttggctgttaaaagatgctttgcaatgaagaatt

SEQ ID NO: 891 - DNA, 303 bp, Homo sapiens; identical to SEQ ID NO: 890

SEQ ID NO: 892 - DNA, 303 bp, Homo sapiens; identical to SEQ ID NO: 890

SEQ ID NO: 893 - DNA, 539 bp, Homo sapiens
tctgcttaagtacaagttgtctgcagcgaaggaagaatttgattgtagtatcaacagaaccagacagaactctttgaatataattatatatcttggaaactgactcatcaaagctattagattacatagcatcatttaagcatcattgggctctgtacttttcattatctgtacttttcattatggagtataataggctttatttggtacagaaattgggtctaagatggaaacaacttgtgatttttgaataaacttttggggattagttactttgatgttgtcaagatagcagcatagtaagtcctctgcctttccttttgatttatttataatttagaatcagtttatgattttaaaaaatgtgacagacacagtggcatgcaccagtagtaccagccacatgggaaactgaggcagaaggatcacttgatcccagaagatagagaccaccctgggcaacatagtgagagccccatctcaaaaaaaaaaaatcaattcccaataccattccagaacacttttaatataaccagatg

SEQ ID NO: 894 - DNA, 1196 bp, Homo sapiens
atcccggatctgaaagaaagagccacagtgactccaagagtggagccagggcatgctggacactgcatagctatggccaagtgtgtcacctctgagggagatgtgagagaaacgcagagggatcgcttgtgactgtgccttctcgatgtatgatggactgttctgctcaaatagtaagtgtgaccaaggagccggtgaacataggaaacaaagaatatttcatttgacattataaggaatgcgacaattctagtcacttgaaagtgaactatatctgtcgagaattcctagttttaattgggaagaaatgcgcttctcttcttgaaaagccacaggttattgctgttatgtctaatatcagtcctctctggatttctcaaaagattttctgtatatcctaccattttccttctgttgctgcagtttggaagtagtttgttatcaggattatcaaagcatcattgctatttatgacaatgactttaagaaatgcaagaatatttggaacactgtagaaaaaatattttagcctggaaggcaaatactaatttcaggaaccattgatctgttataaaacaggaccactcagacatttagctctaagactttcacatatccgttgttagaggcgtatagtggggggcatgactcagcttctgcttaagtacaaggtgttgtctgcagcgaaggaagaatttgattgtagtatcaacagaaccagacagaactctttgaatataattatatatcttggaaactgactcatcaaagctattagattacatggcatcatttaagcatcactgggctctgtacttttcattatctgtactcttcattatggagtataataggctttatttggtacagaaattgggtctaagatgaaacaacttgtgatttttgaataaacttttggggattagttactttgatgttgtcaagatagcaccatagtaagtcctctgtctttcctcttgatttatttataatttagaatcagtttatgattttaaaaaatgtgacagacacagtggcatgcaccagtagtaccagccacatgggaaactgaggcagaaggatcacttgatcccagaagatagagaccaccctgggcaacatagtgagagccccatctcaaaaaaaaaaaatcagttcccaataccattccagaacacttttaatataaccagatg

SEQ ID NO: 895 - DNA, 1199 bp, Homo sapiens
atcccggatctgaaagaaagagccacagtgactccaagagtggagcaagggcatgctggacactgcatagctatggccacatgtgtcacctccgagggagatgtgagagaaacgcagagggatcgcttgtgactgtgccttctcgatgtatgttggactgttctgctcaaatagtaagtgtgaccaaggagccggtgaacataggaaacaaagaatatttcatttgatattataaggaatgcgacaattctagtcacttgaaagtgaactatatctgttgagaattcctagttttaattgggaagaaatgtgcttctcttcttgaaaagccacaggttattgcttttatgtctagtatcagtcctctctggatttctcaaaagattttctgtatatcctaccactttccttctgttgctgcagtttggaagtagtttgttatcaggattatcaaagcatcattgctatttatgacaatgactttaagaaatgcaagaatatttggaacactgtagaaaaaatattttagcctggaaggcaaatactaatttcaggaactattgatctgttataaaacaggaccactcagacatttagctctaagacttttgcatatctgttgttagaggcgtatagtggggggcatgactcagcttctgcttaagtacaagttgttgtctgcagcgaaggaagaatttgattgtagtatcaacagaaccagacagaactctttgaatataattatatatcttggaaactgactcatcaaagctattagattacatagcatcatttaagcatcattgggctctgtacttttcattatctgtacttttcattatggagtaaaataggctttatttggtacagaaattgggtctaagatggaaacaacttgtgatttttgaataaacttttggggattaattactttgatgttgtcaagatagcagcatagtaagtcctctgcctttcctcttgatttatttataatttagaatcagtttatgattttaaaaaatgtgacagacacagtggcatgcaccagtagtaccagctacatgggaaactgaggcagaaggatcacttgatcccagaagatagagaccaccctgggcaacatagtgagagccccatctcaaaaaaagaaaaaatcaattcccaataccattccagaacacttttaatataaccagatg

SEQ ID NO: 896 - DNA, 428 bp, Homo sapiens
atcccggatctgaaagaaagagccacagtgactccaagagtggagccagggcatgctggacactgcatagctatggccacgtgtgtcgcctcccaggtagatgtgagataaacacagagggatcgcttgtgactgtgccttctccatgtatgatggactgttctgctcaaatagtaagtgtgaacaaggagccggtgaacataggaaacaaagaatatttcatttgacattataaggaatgagacaattctagtcacttgaaagtgaactatatctgtcgagaattcctagttttaattgcgaagaaatgtgcttctctttttgaaaagccacaggttattgcttttatatctaatatcagtcctctctggatctctcaaaggattttgtgtatatcctaccattttccttctgttgctgcagtttgg

SEQ ID NO: 897 - DNA, 494 bp, Homo sapiens
cgacctagaggaagttggaaatcccactatcctggcttcctgctgaacaatatctgcttctctttctgactcaggctgatgcatctgtatacttagcttcacttctccagtaaataagggagagctttattataaaagacaacttctattgattttcaagggggtgggtggttgtcaagctcactcctttctatgcactgagggaaaattattgtaagcgatctgtaaaacaatagatgaaaaaagaggagataaaaattaaataaaatttaaataaaaactaggatcctaagtggaaaaatagctttaaattagaaattaataccaaaaaataatgatatgtaatctaaggtgaaaatattttgaagactatcaggatatctcccttaaatgttatttagttctgaaaaatatgtattgaagaactgttatattttactttacgtcatattaaatgtgctaaaattaaagagaaacaagtagataaaagtaaa

SEQ ID NO: 898 - DNA, 494 bp, Homo sapiens
cgacctagaggaagttggaaatcccactatcctggcttcctgctgagcaatatctgcttctctttctgactcaggctgatgcatctgtatacttagcttcacttctccagtaaataagggagagctttattataaaagacaacttctattgattttcaagggggtgggtggttgtcaagctcactcctttctatgcactgagggaaaattattgtaagcgatctgtaaaacaatagatgaaaaaagaggagataaaaattaaataaaatttaaataaaaactaggatcctaagtggaaaaatagctttaaattagaaattgataccaaaaaataatgatatgtaatctaaggtgaaaatattttgaagactatcacgatatctcccttaaatgttatttagttctgaaaaatatgtattgaagaactgttatattttactttatgtcatattaagtgtggtaaaattaaagagaaacaagtagataaaagtaaa

SEQ ID NO: 899 - DNA, 489 bp, Homo sapiens
gtttttagaattttcattgaagatcaagaaacattttattcactcaacagtcatgttttaaccaccagctgcatgtccaccactgtactagatgctaagaagtatcttctattttgtaaataaagtcctaaattgattataattaaaagttggaggcaagggttatatgagaagtctctgtaagttgtgctcaatttttctgtgaatctaaaactgttctaaaaaataaatccttaaaaaggaaaaaaaagttggagaaaaaataaaacatatacagaaacaattgaagaccaattgcaaaccagtaagattttgtgccagaaatgttttaaaaatctacatatgaatactgaagagctatggagtataggaatgatcaacaacagaagaattaatctgattaagcttcttttaggagttgatggaccaaaaattgaaaggcagattataaggacattccacataggggaaacagcatgagaaaaggta

SEQ ID NO: 900 - DNA, 518 bp, Homo sapiens
ttacattcctagttggggccaacagtgtatcagcagactagccagaaatctatcagggagatttgggaaaatggcacagtgatagggagccttgataaactcaccaaaacacttcaaacacaagcaggagatatcaaagagggctcaagctacctatacaccctggatgactgtgaaatctgcacatatgcagagaagatgcaaaaaggcctggcagaaagtaaatgccagggcagacttgaaaactgcctgagtttttaatgggctcccccaacccaaccacagacccatgggcagagggtaaaagctttactagcttagggtatttgagcataaccaccgactaattactggctgaccactaagctatgcagacatgggagtgacccctaagaatcaggcttaaaaataaaaacaaaaataagttttaaaaaattaagtagagagataagcagcgatgcaccatgaaggagatggattccacagatttagtttaggcaacttaataaacaaaaaaa

SEQ ID NO: 901 - DNA, 1647 bp, Homo sapiens
ttttttatattcttgtgtgcctctgagagtccagcaccactgcccttgagatctagatccccctgcaagttaaggcaacctttggcttttctttttgaaagtcataatcttagtgtcttggtggctgaaccatcagtcagttccaaagttccctttatcatttctcacaaggaatttagggctcctacaggtaagacatttgttgatcagtcccaacagcctagaattccctaaatgaatgtacatattaggtacttatccaaactctttccatctgaataaaataaaacgtggtgtctgaggttcattttttgttttatatctctccttgttgatttatatgtttagaaactagatatgtatatttgtctgtatgaatagctgtatatgctctatattgtattatactaaacatgtgtctccattaagtctaagctttcttttcctcatcacttcgttctcagaactcccgttctgacttatatttagcctggcaataggctgaagcatgtctcagatgcgagtacttacaccttttaacatagttagaattgggaatcccactcatcattcctgtttttatttgctctctcagaatggtcattgtgtatttccttgttgcatatgtggttactggccttgaactctggatgtagtggttatcaagaactgcagattgatctcttctgtattttcttcctgtccttgaaaatactaccaacttctgttgttccttttgacataaaaccaaataatcaatgttatgtttttgtgcttgttccccacttgattcatctgcagaagtcctacgtaggagagtttctgtatagccatatttttatttaggaatctaagtacagcaaatcaactttggactaagcattaggaaatctgtgtttttggcttggttgggttgttgaattgctttgtaaactctgtgcttgcttagactgcttgcctaatcagtttggttctgttccataatgccactactagatagttcagtatctgaagcatctaggttgcttctagtcaccatggagacctaacagaaggcttggtgtaaataagggtagcacctgtgaaggtagcacaggtgaaacagtacctgtgtaatgcaggtgttggagatgcatggggataggtattgcttgtaaaacaagaaagcctgaagtcgggtataggtgaacatattgtttctactggtaacagtgccatggacccatttctttcttctttaacagtgactctggacttctaaaacttcaacttattatccatctcttttgcctctctcctctccctttaaccatggttagacctcttcttgcttcacctctgttagagattgagcagaggcaggaagaatgaaacccagaaaagtcaactgaatttttagcaataccctcaaaagatttcgagtgggacgaaggttttaactattcatattacctatgtcttattctttgtgtaattgaaaatttgtcagtttcttcttacaaatacatttttattaaaatatgttttcatttaaccagtcttcacctatatcacatagttatcccagtggccccaaacttaaccaaatggatgattaaagggtgactgattctaaaattatgatctagagccaattaatttgttcac

SEQ ID NO: 902 - DNA, 935 bp, Homo sapiens
gcggccgcgccaggccaggtgtgccctagaaggggtctgcggccgggaaagttctgtccgggtccttgcaccgccctcggaaggtcttaggttagcgggcatctcccacgtctcggagcccaaacgtgagaagcacacggctgatttcttaattatattcatgccaaggtgactttttttgttctgtattttaagcaaacttgagccatagaaacctgttaacttgccctgcaagtagatttttcacagacagctgacggtgtggtagtgaccatgaagttcagtagttttgcccagtacagaaatatttaacactccataaaatgttgcatctgaacttttcctgaactgaaacttatgccaaaaaaattactagatgagaaaatgtgtacttatgaatcctacattcaatgaccagttttaaacgtattgttacaatgttacagtttctataagctgtaggtttttattctcattttaaaagaatttttaaaacttgcatttgtattcatattgcagttacagattagttttaaatgaaaaaaggttttgagatggatgtcttcttgaatatagagtgaacccaacgttttaattctcaagctgtaaacagcaactgaaccataactccattaaatttcttccaactaaaaaattacttctgttgtccaaaaggggctgtgttagccgttatttcctgaagttcatgcaaataactaagttgtgaggctgattacatcattgattgtacttgagtactgaaattttaaaactacttaaggggcataaagttgatcagatgcgattctaattgatttgctgattcccagaactggacgtaggttctatttgaagcagtctatatttttggaaaattacagacggtcttgtttggtctttttcaattaaccacttaaaaattctcaaccatactt

SEQ ID NO: 903 - DNA, 527 bp, Homo sapiens
aaaaacccaactacattgggttttatgataggagttaaataacagaggtttttttctcacatcgtagtaagtcctgaagtacaggttgctgatgttgtttcagtggctcaatgatgtcaaggtgagcatctttgtgcttctcttgtctcctcatgctcacaatgtaagtgctgaaattgtagctcttacttttgcttttgaggcaggaagaagaaacttggaagtgcttaccagttgcaggtgtccctttttatcaaagaggcaagcttcccctgaattccctccagtgaatctctgcttacatctgggctggggggtaaaaggaagctaagagagtatatatctgactctatagcccctgtggttggaggcatcatgatagaggagggttggaaatagctttgagtagcccaagcaacagtgtcatttaacaatagggagccacaggatacccagggggagacagtagttctcaaggagagaaaagcattgaaccacttggtagtggtgatggcaagccatgacca

SEQ ID NO: 904 - DNA, 527 bp, Homo sapiens; identical to SEQ ID NO: 903

SEQ ID NO: 905 - DNA, 553 bp, Homo sapiens
cagtcacactttttacttatgtatttacaagtaaaagaatatgtaaagacaattgagtattgtgcaacattgatgtgtatttataaaatagctttattttataataaagtaatatgtgtagatagtgtcatgaaggaaatattctccccataatatagtttcccttcttcatttcagcacatgaaattaaacaaacagaggaaacttcatctcaaacccatctaacctagtcagtaccatagtaagctgctttaaatcatatttaaaacaaggtagagtacaaataaatacatgcatgtaagacccaaattaaagcccctcaaaaatctattacttttaatttcataaataaattttttattgggcttaatttactccccgtataaaataataatatgttttaagactaaatttttttgtttcctgtcaaagtaaattttttgatgttgttgaaattaaccattgtaacatcattaaaaatatagcctactgtgtgcttaataccataaaatataaaaatgacagtaatattaagtctagaatttgccaaaaa

SEQ ID NO: 906 - DNA, 122 bp, Homo sapiens
cacgcctgtaatcccagcactttgggaggccgaggcaggcagatcacgaggtcaggagataaagaccatcctggctaacacggtgaaaccctgtctctactaaaaatacagaaagttagccg

SEQ ID NO: 907 - DNA, 2586 bp, Homo sapiens
ggctgaaagcacgttaccagacaatgagcatcttgcccatggagctatataaagagtttgcagagtatgtcaccaaccattatcggatgctgtgtgcagtcttggagcccgccctgaatgtcaaaggcaaggaggaggttgccagtgcactagttcacatcctgcagagtacaggcaaggccaaggtgagtgttgtgccctcagggaaaggtgacttgggaatgggcacttgcttgggggttagtgaggacagggcaaattcacgagattgggttgtgcagaggctgacacttggattttcctgggcctcaggacttcctttcagacatggccatgtctgaggtagaccggttcatggaacgggagcacctcatattccgcgagaacacgcttgccactaaagccatagaagagtatatgagactgattggtcagaaatacctcaaggatgccattggtatggcccacactcaggccctcttcttcccaaacctgccagatgtccaccccagaccccaagtccacccttccacagcttgatacttcctaacccagagtcctaggactccagcctccaacacctgattctgaaatttccccaaccctggccacccccttccctgcccttggaaagtgtgaccacaccctcttgtgcccccaccccccaggagaattcatccgtgctctgtatgaatctgaggaaaactgcgaggtagaccctatcaagtgcacagcatccagtttggcagagcaccaggccaacctgcgaatgtgctgtgagttggccctgtgcaaggtggtcaactcccactggtgagactgggaacgctgggctggggggccagggtcgggggaattatgtgttcatctgttcatctatctgtccatcctcaaagaggactgagcaccatttatgggcaaagcattgttctaggcgctatagagcaaacaggtgaaagaggcctggtccctgccctcagagggcctccaccagaatggggacaaattagaagaaaaaaaaaaaaagccacagagccataatggtgtgtaagtgctgagtaagggtccccccaacctctgtgtgacataaggtcagagagaaggcagagctttgagataagtggggaagaggtgcccccttgggtaggctttgaagactggtttaggttctgatatatggacatagttggcaagaaagacatttcagaagaaggctgtgagaaaggcacatgtgtgatggtgaaaaggcccaggagttttcaggggacattaaagtaggttagtagcaattacatcaggtttagtggagcatgtgcctcataatggggagtggcgggagagatgtctgggcaggaagattagctttagaaactggaaggcctcaaggagtctgaggtcattggtaggccttgggatgccattaaaggtgtcagaaatattgtgatttagaagattaatccataggctgggcacggtggctcacacctgtaataccagcactttgggaggctgaggcgggcagaccacctgaggtcaggagtttgagaccaggctgaccaacatggagaaaccctgtctctactaaaaatacaaaattagccagatgtggtggcacatgcctgtaatcccagctattcgggaggctaaggcaggagaatcacttgaatctgggaggtggaggttgtagtgagccgagatcacacgattgcactctagcctgggcaacaagagtgaaactccatctcaaaaaaaaaaaattaatccataagtagagtgtatgtagtagagtagagggatgtatgttgggggatgactggaatagagccagctgggggctcggaggcatgaaagtcagatcctgaatcagaacagtgacagaagttaggaaggagctactggaaggaccctctcgggaaaggatcagtaggaattgtcagcttattggaaaggagggagcatgtctgtggggagtcacggatgactcaagaggccatgaggctggtggttgggagaccggtggcctcattgacaaccaggaaagtcaggaggaggagccagttggaggtgtgggggcgatggtgagctctgctttacaccagccgagtttaaggtgtcagtgggacattgaagtggaactgggaggtgcggggagtgagctctgagccattccagggactggggatcatgcctggggcacctccatccccatttccctggaatccagaagagttggggggtccgagctccctgtacctcaagtgaccctccatctctctcccatctctgtctctccctggtgtctgtttttcttctcctcctctccttgtctctctcccacacccctccatctctctcccacgtgtctctcccctcaccttctctccccctccatttctctctccctaatctgtctgttccctctgccatggcccccttcttcaagcagcctcccatcttgctcctgcggtccctccttccctgtctctctcacccctgtttccacaccctcacctcctaccacccccctcagcatgttccctggaagctgagggtctctggggctcagtcccggtctctctctttctc

SEQ ID NO: 908 - DNA, 2587 bp, Homo sapiens
ggctgaaagcacgttaccagacaatgagcatcttgcccatggagctatataaagagtttgcagagtatgtcaccaaccattatcggatgctgtgtgcagtcttggagcccgccctgaatgtcaaaggcaaggaggaggttgccagtgcactagttcacatcctgcagagtacaggcaaggccaaggtgagtgttgtgccctcagggaaaggtgacttgggaatgggcacttgcttgggggttagtgaggacagggcaaattcacgagattgggttgtgcagaggctgacacttggattttcctgggcctcaggacttcctttcagacatggccatgtctgaggtagaccggttcatggaacgggagcacctcatattccgcgagaacacgcttgccactaaagccatagaagagtatatgagactgattggtcagaaatacctcaaggatgccattggtatggcccacactcaggccctcttcttcccaaacctgccagatgtccaccccagaccccaagtccacccttccacagcttgatacttcctaacccagagtcctaggactccagcctccaacacctgattctgaaatttccccaaccctggccacccccttccctgcccttggaaagtgtgaccacaccctcttgtgcccccaccccccaggagaattcatccgtgctctgtatgaatctgaggaaaactgcgaggtagaccctatcaagtgcacagcatccagtttggcagagcaccaggccaacctgcgaatgtgctgtgagttggccctgtgcaaggtggtcaactcccactggtgagactgggaacgctgggctggggggccagggtcgggggaattatgtgttcatctgttcatctatctgtccatcctcaaagaggactgagcaccatttatgggcaaagcattgttctaggcgctatagagcaaacaggtgaaagaggcctggtccctgccctcagagggcctccaccagaatggggacaaattagaagaaaaaaaaaaaaaagccacagagccataatggtgtgtaagtgctgagtaagggtccccccaacctctgtgtgacataaggtcagagagaaggcagagctttgagataagtggggaagaggtgcccccttgggtaggctttgaagactggtttaggttctgatatatggacatagttggcaagaaagacatttcagaagaaggctgtgagaaaggcacatgtgtgatggtgaaaaggcccaggagttttcaggggacattaaagtaggttagtagcaattacatcaggtttagtggagcatgtgcctcataatggggagtggcgggagagatgtctgggcaggaagattagctttagaaactggaaggcctcaaggagtctgaggtcattggtaggccttgggatgccattaaaggtgtcagaaatattgtgatttagaagattaatccataggctgggcacggtggctcacacctgtaataccagcactttgggaggctgaggcgggcagaccacctgaggtcaggagtttgagaccaggctgaccaacatggagaaaccctgtctctactaaaaatacaaaattagccagatgtggtggcacatgcctgtaatcccagctattcgggaggctaaggcaggagaatcacttgaatctgggaggtggaggttgtagtgagccgagatcacaccattgcactctagcctgggcaacaagagtgaaactccgtctcaaaaaaaaaaaattaatccataagtagagtgtatgtagtagagtagagggatgtatgttgggggatgactggaatagagccagctgggggctcggaggcatgaaagtcagatcctgaatcagaacagtgacagaagttaggaaggagctactggaaggaccctctcgggaaaggatcagtaggaattgtcagcttattggaaaggagggagcatgtctgtggggagtcacggatgactcaagaggccatgaggctggtggttgggagaccggtggcctcattgacaaccaggaaagtcaggaggaggagccagttggaggtgtgggggcgatggtgagctctgctttacaccagccgagtttaaggtgtcagtgggacattgaagtggaactgggaggtgcggggagtgagctctgagccattccagggactggggatcatgcctggggcacctccatccccatttccctggaatccagaagagttggggggtccgagctccctgtaccttaagtgaccctccatctctctcccatctctgtctctccctggtgtctgtttttcttctcctcctctccttgtctctctcccacacccctccatctctctcccacgtgtctctcccctcaccttctctccccctccatttctctctccctaatctgtctgttccctctgccatggcccccttcttcaagcagcctcccatcttgctcctgcggtccctccttccctgtctctctcacccctgtttccacaccctcacctcctaccacccccctcagcatgttccctggaagctgagggtctctggggctcagtcccggtctctctctttctc

SEQ ID NO: 909 - DNA, 89 bp, Homo sapiens
ttttttttttttttgagacagagtctcactctgtcacccaggctggagtgcagtggcgtgatcttggctcactgcaacctccgcctcct

SEQ ID NO: 910 - DNA, 1880 bp, Homo sapiens
cccagagttgcacatctggaagagaagaagatagcaactgaaaagaaaatagaatggtattgacaaagagaaaagatggcgtcattaggacaattactttttatttttggaacaactcgaggctttacacccattcttttcccacatttattttttctatcagaattcttaaatctaagaaacaaataatatggaggttctttatattaacacattgctttaaattaggaagaaaactgtgtataggctgcagcagactttaaaagcattgtaagactttagatttggaaatcaactttaataacatggaaactttagatttaagagatcatttaatacagctactttgatttggcttttaagagaactgaggcccaggtagcccagaccaaggatcttttgcaaggtcgtgctactgggttctttagcgtcaagactgtaacctacatctttaggttcctaaatttttatcatgccttcttgttacctaactgttgattgttgaactttcttttttcttttttgagacagggtcttgctctgttgcacaggctggagtgcagtggcgcagtcatggctcactgcagcctgaaacttgagctcaagcaatcctcccatgtcagcctctcaagtagctgggactactggcatgtgccatcacacctggataatttttaaaaattatttgtagacacagggtctccctgtgttgtgtgggctggtctcaaactactgggctcaagctgtcctcctgcctcagcctcacaaagtgctgggatttgaattttcttaaacctaaatcaatattataggcctcaccttaggagaactttccaaaatattgttagtgttgaccaccttagcattacatttgctaacgacagtcatccaggtttactgaaccaggaaaccaactttcaggttaataagacagtttcgtctatgtgccatccttatccttgtctggacatatccatagagcacgcattttaaatctgaaagaatatatgtagtctcccctaccccagctttttttaagtagcaagggctattgaaaaaaatcagaaccctccgcttacgctcgcatacatgtagcttaaaatatatgttgcttattgaaagcattgtttaagttgaactcacgagatatactacatcatgtaatatgtctgcatttgtccatgcattcttttcggaaacctgatcttacttatgtctgcatttaacagataggctaggttaagttatgttaaaacatgttgtactgaggttggattcaccgtgtcacagcctggctttcttccttgattagctttaatcaaactctctgcattccgtgaccttaataaagctatttttcctgacaactgaagactgtcttaacaagcatagttcatctgtgctgaaactaaggctgagttaagatggggtttaggtcctcattaaagtccacagcatggagtgtaagaagaaatgatgaaatggtgctccctgaaacatctcttctttaaatttaattagacaaattatacgcaaactagtagatgccctgggaaggcaatcaacattagggctaataaaaagcttgagtagtataaaaaggctgggggaggtgctgtggagcctttctaacgcctatgagaggcaaattaaaaccaattgcgaaacatggaaactggatgaatttcaatattgatttagaaattaattttattatgttgttctaaatataaaaataaaggctatacttattaatcttccagaatttgacatgttaacacctatgcacaaagcattttatggatctttatatgctgggagacacaattatgggctgacttggaagttttggcagacctgggttcaaattctagcaactt

SEQ ID NO: 911 - DNA, 1880 bp, Homo sapiens
cccagagttgcacatctggaagagaagaagatagcaactgaaaagaaaatagaatggtattgacaaagagaaaagatggcgtcattaggacaattactttttatttttggaacaactcgaggctttacacccattcttttcccacatttattttttctatcagaattcttaaatctaagaaacaaataatatggaggttctttatattaacacattgctttaaattaggaagaaaactgtgtataggctgcagcagactttaaaagcattgtaagactttagatttggaaatcaactttaataacatggaaactttagatttaagagatcatttaatacagctactttgatttggcttttaagagaactgaggcccaggtagcccagaccaaggatcttttgcaaggtcgtgctactgggttctttagcgtcaagactgtaacctacatctttaggttcctaaatttttatcatgccttcttgttacctaactgttgattgttgaactttcttttttcttttttgagacagggtcttgctctgttgcacaggctggagtgcagtggcgcagtcatggctcactgcagcctgaaacttgagctcaagcaatcctcccatgtcagcctctcaagtagctgggactactggcatgtgccatcacacctggataatttttaaaaattatttgtagacacagggtctccctgtgttgtgtgggctggtctcaaactactgggctcaagctgtcctcctgcctcagcctcacaaagtgctgggatttgaattttcttaaacctaaatcaatattataggcctcaccttaggagaactttccaaaatattgttagtgttgaccaccttagcattacatttgctaacgacagtcatccaggtttactgaaccaggaaaccaactttcaggttaataagacagtttcgtctatgtgccatccttatccttgtctggacatatccatagagcacgcattttaaatctgaaagaatatatgtagtctcccctaccccagctttttttaagtagcaagggctattgaaaaaaatcagaaccctccgcttacgctcgcatacatgtagcttaaaatatatgttgcttattgaaagcattgtttaagttgaactcacgagatatactacatcatgtaatatgtctgcatttgtccatgcattcttttcggaaacctgatcttacttatgtctgcatttaacagataggctaggttaagttatgttaaaacatgttgtactgaggttggattcaccgtgtcacagcctggctttcttccttgattagctttaatcaaactctctgcattccgtgaccttaataaagctatttttcctgacaactgaagactgtcttaacaagcatagttcatctgtgctgaaactaaggctgagttaagatggggtttaggtcctcattaaagtccacagcatggagtgtaagaagaaatgatgaaatggtgctccctgaaacatctcttctttaaatttaattagacaaattatacgcaaactagtagatgccctgggaaggcaatcaacattagggctaataaaaagcttgagtagtataaaaaggctgggggaggtgctgtggagcctttctaacgcctatgagaggcaaattaaaaccaattgcgaaacatggaaactggatgaatttcaatattgatttagaaattaattttattatgttgttctaaatataaaaataaaggctatacttattaatcttccagaatttggcatgttaacacctatgcacaaagcattttatggatctttatatgctgggagacacaattatgggctgacttggaagttttggcagacctgggttcaaattctagcaactt

SEQ ID NO: 912 - DNA, 504 bp, Homo sapiens
acatttgttaagtgctgcatgccaaacatcctgtataccttaccatctcatttaatattgataacaactccacaaggtagttattactgacctaattttgcagataaaaaaaaaagagattcagaaaggctacgtgaattgcattttagcatagaagagtcaggactggaactcagtgttggcctagttcttgggggtggttggatggcaaactagtgcaggtatgttcataacttgtaagatcaaatttgtcatataaattacggggatatgtaatctctctcccttctggctcttttcatccttgggtgagttctaaataaaactattttgtgttatttttttaaccctcattccattgctttcagactctggttctcaaccttggctgcccatttagaatcacctggagtgggatctgggcgttagcattttttaaagctcctctagtgattccaggtaggcaacctgcactaaagacctctgctttaaaatctctctacc

SEQ ID NO: 913 - DNA, 504 bp, Homo sapiens
acatttgttaagtgctgcatgccaaacatcctgtataccttaccatctcatttaatattgataacaactccacaaggtagttattactgacctaattttgcagataaggaaaaaagagattcagaaaggctacgtgaattgcattttagcatagaagagtcaggactggaactcagtgttggcctagttcttgggggtggttggatggcaaactagtgcaggtatgttcataacttgtaagatcaaatttgtcatataaattacggggatatgtaatctctctcccttctggctcttttcatccttgggtgagttctaaataaaactattttgtgttatttttttaaccctcattccattgctttcagactctggttctcaaccttggctgcccatttagaatcacctggagtgggatctgggcgttagcattttttaaagctcctctagtgattccaggtaggcaacctgcactaaagacctctgctttaaaatctctctacc

SEQ ID NO: 914 - DNA, 336 bp, Homo sapiens
ctccagcctgggtgacggtgcaagactctgtctcaaaaacaaaaaacaaaaagaggaataatagtatctgctctccttgccttttgtgggtttttttgatgattaaatgatatctgagggatacaaaaatgctttggaaactacagggtgctttacagactgtgtgtgtgagtgtgtgtgtgtgtgtgtgtgtgtgtgtgtgtgtgtgtgtgtacagaaaatcctttatctctttgcttctcaatttcttttcttaggaaaatcagattatttaaatcccattatgcacagctctcctctgttcttactaagcctctgtattccattacctccagt

SEQ ID NO: 915 - DNA, 1184 bp, Homo sapiens
attatgtcacatacttttttgtggtgagaacacttgaaatctactctcttaagcagttttcaagtgtataatacattgtgatgaacagtagtcaccatgttgtatagtaagtctcttgaacttaaaaaaggaaagaaattatgagtctcttcacatactggtattaagcaatatttgtttacagtgctggaaaggagcttccttacttattaggaacctcaggtggacctctcatggttgcagatggcttctcacttacaaaggagattgtgaccagctgttgagaactgtttggctttacttccttcagagaccagacttggttgtatgtcagagtagtcccccccttatcctcaggggatatgagcccagaccccccaatggatgcctgaaatcacagatagtaccaaaccctatatatgctatgtttttttcctatacatgcatacttgcgataaagtttaatttataaattaggcacaggaagagattaacaacaactataataaaacagaacagttataaaaatacagtgtaataaaagttatgtgaagatgatctctctttctcaaagtatgttatcgtatgtaatattttcagattgcagttgatatggatagctttaaacctcagaaagggaatcgcaaataaggagggattaccatatatcctcgctaagagtcctctgactctttttctctcctcagactcaccccacacagaccgcgtttctctccagtgtcgacctacacactcactgctcttaccagatgatgttgccagagtcagtagccattgtttgctcccccaagttccaggagtgagtatagagggcatggttctgggtgtttcaagggggtagtagggaagaaagcctcaggggaaaaggtctctattcttgtggacttgtcctttgtaaaatacatagattataatgtaagttggttattctaaagggcttccttttaagccccatatcatgatttatctatcatgcttgttcaaaaagatatccaagtaacaacttagttgcttttctaagaaaagtctacaagaaatttgaagtgtttgacttgaagcgataggaatgtcaagagttttatgttggattagaaagtttcaaaatcataaaatataaaaaaataaaaaataaaaaataaaaaaatataataaaaaaataaaaa

SEQ ID NO: 916 - DNA, 100 bp, Homo sapiens
tttttctttttttttgagatggagtctcgctctgtcacccaggctggagtgcagtggcgcgatctcggctcactgcaagctccacctcccgggttcatgc

SEQ ID NO: 917 - DNA, 432 bp, Homo sapiens
cagcactacgcttaggggccattttaaacagcaaagtcaccagaaaaagcacaaaaatggaaaacatgtggcactgaatagaccatgaaaaggacacttgtttgcagtgcgagagcttaaaaaaaaaaaaaggcagagcaacaccttgttcaacctcaactagaaacatgctcgtcaggcaagtcaaatttttcaccaccctgagcatgtccagaaatgaccaaaaggctctgagagtactgtttgggggattacaaataaagcaagtacgcagttcacaaatacagaatccaagaataatgaggatggactgtacttaggtacacagtcctaagttaaacagacataaataaaaccgccaatgtatataaagcctaacttatacaagcagagccattaagttgaatataagtgttaaaaacagctatattt

SEQ ID NO: 918 - DNA, 663 bp, Homo sapiens
tttttttccagctttgtttctgtcaacagtgagtgaactacaatactcatatatttacaagcatttctgcttgttttccaaattaccagaagagtaaaatcacagaattaaaagttccaaatatttttcagtttcaactactattaacaaaatatcccctagaaagcctggaccacttcacacaccccaccagcaatctgaataactgttaacaaaccaacatctttgccacttgctaaaatgtggaattctttcttgagctaaaaacaaacgaaatcacaaaattggctaagtattgaaaaggaaaaattattatttccttattttattatccatgaggttaaacccttcttccagtttttatttcttcttttgaaaacttgcatttcttcctctgaaaatctgtcttggatacataaacatttttaagagtgataatatatatattgccaagctgcctttctgaaactctaggttgttgcatttaacattttacacaccaatcagcaacatacaaattttgcccactgacaaacaagccattcccacaggatcttaaggtttggttacagcagaaatgttatcaagtaggaaagaaagtaataaaatatgtttccaacaggtttttaaatagatttgtaagtaatttaactatgtatgtgc

SEQ ID NO: 919 - DNA, 624 bp, Homo sapiens
atgaccattttgctggtagagtagggattgtattggtagttgtgtgagattgacagggaaacctgtttgacagctatggcagtggtttgggtgaacagtgctacaggtgtgaaccaggccagggcactggggatgaaaaactggtcgaaagaagaggtgtttagaaggtagagcagaacaagaggcactctagacctagatggagtggccagggaaataggaggaaaatccgttgccaacagagaaaatgcaaagaaggaaatattcataaggcctgaaaaatacccctgggtttgcaagttacgggtttgccaattgtgaggcttctgtaaccctgcccttggggagaacagttttgaagcatccactggtggattggagaaacagactgcagtggttggagagaggatggaagagaagacgctaagatagggctcaactataaggaatgaattgtagaattaagccacctgcctataatcagtagggctttccttttttatctcttttgctcattattatcacaccatatccctgagggtgaagaacaactttgaagaggcaatgcctgataaatctggaataggggagaataattgggaaattcattaatgatcactccat

SEQ ID NO: 920 - DNA, 205 bp, Homo sapiens
agcaaagggaggttggttcaaaatgcctctaacgtgctctctggctgtaacattcaaccaacttcttcctcctgtggttgcctttgcctctggccccaggaatccagcaaatgtgctttagcccaagctgagagtgaccagtgggaatgaagatatcagtcttccagactggggaagcagacggtgaatttcaagtgcaccagag

SEQ ID NO: 921 - DNA, 782 bp, Homo sapiens
tgaaagactctttttctgagtagcatgacatttctgcaggcaaaggaagtgagtatagactcccaattctcttcttttccaggatgtacactagaatctgaagcatcctcttcaccctcgctccccttcaagtttccgaagccactaagttggcaatgaaattattttgtttatgcaaggagcaaaatcacatgtcaagctgataaataatgtatgaaatatcatttagttaatttcaaaggcgccaagactatgacaccattgcatccattcagatgaaaccttggttctccctgtgttaggggagagatctaaatgaagtatgtcctttatatttagatgactagatctgtggccctcctggcttgtttttcagggcccttaatactgatcagagaaatttgctatcacaaaatagctttcaaaacagaacagagctttttcttattgttttcattccaaattacctgaacctcagctttgtctgatcttttcaggagcaagaggttcacacattgcattcacagtatgcctacaaagagctactgagttgtttttaatgcattttatgctacagccaccagtggccaaattataagccagaattctgttagtagcatggcaaaaatctctcattgcaatgtaatttgttatgagtagataatacaataaaactgaagtagttcttcagtgttgaaattactgagtttcttttaaagtgtgtgtgcacatgtgcatgtactaaggttatggctagatgtgatgtgctaacatcccaaaaa

SEQ ID NO: 922 - DNA, 782 bp, Homo sapiens; identical to SEQ ID NO: 921

SEQ ID NO: 923 - DNA, 782 bp, Homo sapiens; identical to SEQ ID NO: 921

SEQ ID NO: 924 - DNA, 453 bp, Homo sapiens
atcacaaatgcctactggaagacttatcaattatctcagacactgagattgatcatggttttagcaattgtggattttcccacctgcttttatgcagggccaaagcatcaacttggctttctgctctttgggagcacactcagcttgttctggattgtctacacttttctcaacaaataccactaccaaaagttaataaactgtttttttaaccatagattacaactggggtaggaagagtactgcatattacatatatcttaatcttttcaatctaatccagcttgcaaatttcagaccttaaaataatcaatagatttgtagtacggtactttcaattcacatttgaaataggatctgattctgagaaaataatgctgctctaactataataaaaattattgtagccatatcctaatagggggcacattgatggtttgaaatacttaagaa

SEQ ID NO: 925 - DNA, 453 bp, Homo sapiens; identical to SEQ ID NO: 924

SEQ ID NO: 926 - DNA, 453 bp, Homo sapiens; identical to SEQ ID NO: 924

SEQ ID NO: 927 - DNA, 32152 bp, Homo sapiens
ggccgggccgcccgctgcttcccacccctgcagcctgcgctgcggagtacaaagagcggagggcgcgcttgacctggggctggggtccagccctgcccgccggtgccgtctgctcaactagttaggtggctgctgcgcaggattccgggaaacgtcagtctgccatgagccggcaggactgagcctgcgactcggagcagagcgagtgaggggcagagcggtgctcaggagtgcggcccggggccgccggagctgggggtcgggccgggcgatgatccggggcttcgaggcgcccatggcggagaacccgccgccgccgccgccgcccgtcatcttctgccacgactccccgaagcgggtgctggtgtcggtcatcaggacgaccccgatcaagccaacgtgcggcggtggaggggagccggagccgccgccgccgctcatccccaccagccccggcttcagcgacttcatggtgtacccgtggcgctggggcgagaacgcacacaacgtgacgctcagccctggggccgcgggggccgccgcctcggccgccctgcctgcagccgcagccgccgagcactcggggcttcgtggccggggcgcgcccccgcccgccgcctcggcctccgccgccgcctcgggaggtgaggacgaggaggaagcgagcagcccagacagcggccacctcaaggtgagcggcgcgggcgggcgggcgggcgggacgtggggcagccggggcccgttaacggtgcggcgggcggggcggagttgaaaacgcgaggtcgatccggctacggcgggggctgcggctgacaggatgctgacgtcactgccgcgcgccaaaaaccggccccagtcggggggggcctgtcacgtgacaggcgggagcggcgcgggagaccgtccttgcggcaggtgcagtgggcgggagcgcggcccggggtcgctggggaggccgggtcaacggccactgacatcctcccggcgggctgccgagtcctcagttccgagaggaaacgagagggatgagggccttgagttgttccaccgactgcgagagggcagggagcgcacagtgtttgctccattactgcagatcgccctcgccctgttaaaagatgccctgcagagacagccgaagagcaagaaaggacttctgggcctgttctgcggctgaagttgtgccttcgctgcctttcatttatccagcatactacttgctaggtgttgagagcacatagtggaatgggacgctaaaattgcttgcagtctccgactgcttaaagctgggaaggtcgttaccactggttcaaacctattttacagatcaggcagctggggcttacagtgattagtgaggcgaccttcccacgatggcacagctcagtagtggaagagcggggactaggtcgaggttttgtggcttttagtcctgcatgtgtttggggtgactttctgctgacttatactgaactctgtagactgtaagctccaggtgagccaggagtatttctatctagaagactatatgactttactaccttacattctgtaaatgctcaataaaggtgctcaaaaaatatttgtgtaatgaatgaatggtgctaacagaagggtaatatccaggttccatttgttaagtggctgtataagataagcaatttgcaagagataacaagtaaatcacatagtggataactgcatctgtatcagcacataatgtataagttgaaacgagtttgatcattttacatgcagtcacaaggatgttgaaactacattgtttgggttttgaggaaattgatatattttatgtggcattattattaaataattataaggttataaaactataggtttttatacacttcagctcttgaaactgcacctcagtaaacatttgaaagaacagaacctgggccgggtgcggtggctcacgcctgtaatcccagaactttgcgaggcagaggcgggcggatcacgaggtcaggagatcaagaccatcctggctaacacggtgaaaccccgtctttactcaaaatacaaaaaattagccgggcttggtggtgggcgcctgtagtcccagctactcgggaggctgaggtaggagaatggcgtgaagcgggaggcggagcttgcagggaactgaaatcaggccactgcgctccagcctgtgcaaaagagcgagaatccgtctcaaaaaaaaaaaaaaaaaacaacaaaaaaaaaaaccataacagagcctggtgaggtggctcatgcctgtgatcccttcaggaggctgaggctggggaatcacttgagaccaggagttcaagaccagcctgggcaacatagaccgcatctggcggcctgcacctatatacgtagctacatgggaggctgaggcaggaggatcacttgagaccaggagtttgaggctacagtgagacatgatagcaccactgcacttcagtctgggtgacaaagcaagacctcaactctttaacaaaaattgaagaaacttgccaggtgcggtggctcacgcctgtaatcccagcactttgggaggctgaggcgggtggatcacctgaggtccaggagttcgagaccagcctgaccaacatggtgaaaccctgtctctactaaaaatataaaaattcgccggacgtggtggcgggcgcccgtaatcccagctacttgggaggctaaggcaggagaattggtagaactcgggaggcggcggttgcagtgagccgagattgcgccattgcactccagcctgggggacagagtgagactccgtctcaaaaaaaaaaaaaaaaaaaaaaaaaaaaaaaaaaaatgaagaaactaacgatagaagcgttgatagtattgctgagtattactaaaggctacagttgctgttgggctgcctctaggtatcccctagtgagatgtaagatggatcggtatccaccgggtgggtggctcacgcctgtaatccaagcactttgggacaccgaggcaggcggatcacaaggtcaggagatagagaccatcctggctaacacggtgaaaccccgtctctactaaaaatacaaaaaaaaaaaaaaaaaaattggccaggggtggtggctggcgcctgtagtcccacctgctcgggaggctgaggcaggagaatggcgtgaacccgggaggcggagcttgcagtgagccgagatcgtgccactgcactccagcctgggcgacagagcaagactctgtctcagaaaaaaaaaaaaaaaaatttggatgggtatcctaggtatttttgtgttaaccatttataagttttagtcttttaaaaaaaacactaaattagattatgtagttgaacaatataaaggcatacattcataagttcttgtgtaagattttgcctttatggttttattcttatagattaatctagttctggatcacccaagaagattaatgttatatagatgaaatctataggtatgttgtttttggcctaaaacagacttgtccttacccagacattttataaaaattgctaactgtggccaggcgcggaggctcacgcctgtaatcccagcactttgggaggccgaggctggctggtcacgaggtcaagagatcgagaccatcctggccaacatggtgaaaccctgtctctactaaaaatacaaaaattacctgggtgtggtggcacacccctgtagtcccagctacttgggaggctaaggcaggagaatcacatgaaccctggagacggaggttgcagtgagccgagatcgtgcaactgcactccagcctggccacagtgagactccgtcttaaaaaaaaaaaattgctaacaagatgcatgggtttgaattgtatttccatgctgtacacctcttttcagaggtaaagtataccaacggttgtaaaaaacatgtaaaagtgaaatggctgttttatatttctgcttttttcttttctcatgtagtttttcctgttgtaactttcataaattatttggtaaattgatttgaatatgtctttctattgatgaagcaatccacatgcagctccaaaaattcatttatttagctttcccaccgtaagacagaagggtctggaatacacctttatttaagaaagttgctagctagactaagctttgtgggggcaagaaggaaaaagaaaaaaataaggaagttgcttagtttgatttgtggtcagtacactgaactacaaagatagagagtcccagcctgttttactgttttgcttctttaaagtacttgtagttccttatctccatgtgcatcatcagggaattgtgctgagtctgctcatttttggggaagagaggagacaagtctgcaatatagccagtgccaataacattctcccaatatgccacatagaggcactaacagctgtgggtttgagaacaatatttgcgttcatttactgtctattctttgccacttctcccaggggaggtgtcagcgtctgagtcctgcacaccctgtgtcagctttctcttgctcttttgattgttcctgcccaacactgcctccctcgcctgtgggaacacctactagcttattttggctgctcatcacacgagtgcttagcactgttggcatataattatatattatcttcttctggattgtagaattctgagagggaagaaagcaggtctaactgccttctgccacaagttgttccaaggctccccaccttgtccctgtgccctctactaagactgcatttgaagttacttcttcactggggctggtggggtctggcttctcagatactattcaccctacaggatctaccggctgccgtatcctacttcccctttctgtgtcacctgaacacttcaaaacctagactgtacatactgttacgaatagctgatttttaaatactttatacataatacataaattcatagtatttatgaatagtaatgtttgagcaccatgttaaacctaacatcatgttaacatagtaggcactatttattgcctggcacagagtaagcatttcataatgttagcagcaaactgctgggctctgtgttgagcattttgaattctttaattcattttatcctgtttacctgatgaggaatgagaaattagagtccccaagacaaaatctagttaagattgtatggtaagtggcagaactgatcggaaccttctagagtccctgttcttagtccctatactgcactgctcctgggactatcacatgtaaatagacttcaggggtttatttttgttttttaaatattaagctgagataagtagacataagaaatacatactattggccgggcatgctggctgatgcctgtaatcccagcactttgagaggccaaggtggatggatcacttgaggccaggagtttgagaccaacctggccaacatggtgaaaccctgtctctactaaaaatacaaaaaaattagctgggcatggtggtgcacacctatagtcccggctactcgggaggctgaggcatgagaatcacatgaacccgggaggcagaggttgcaatgagctgagattgtgccactgcactccagcctgggcgactaagcgagattctgtctcaaaaaaaaaaaaaaaagaaaagaaaaagaaaaaagaaatacatactatgtatagcttatctatgtctcaattgagatgctttataaaagtgcactcaattcaataaactggaattaaaacttgagaagttgtgaagataggtcaggatgggaagtaggtagttacaagttaggaagcatgtatgcaagtcatgggaagtttgtatctaaatctgaatgtgaaaaggttcacacgcctccctctgagacctatttttgttttccttctaggttgtgcttgttccctttatttgaattctacttataaaaatgtgtcaaggacttttaggttttttagttatcacatgactaaacactttcaaaatcactaatcaaccttctagaggtatggagattgtttttaaaattataattactaaggtatgcaaaagtttttggcaatttaataattttgtgttgcgaatcgtcaacagtcttgacaagatctgtccttagcctccaggtgcacttggctgctgagtgtaacactctgtaattgtccgaagatgcctagaaacatggttttctcattgttaaggccaaaaggaagagggtcctctttaagtaacattgcttattttaatatgtattgttaaaagatggtctttattcatttatttagggcattatatgattatttgttttgtcttattttctgagctaaaataatgcacttattaattagctgggcatggtgacgcttgcctatagtcccagctacttgggaggctgaggcaggagaatcgcatgaacccaggaggcggaggttgcagtgagctgagatcatgccactgtactctagcctgggcgacagagccagagtccatctcaaaaaacaaaaacaaaacaaaaaaacccaaaagaatgcacttagtgaacccttccctgtatatggccagtatgttgtattatgctgtatatttcagcactcactccatttctcatttggaaaatataaatgtgttgctggtggcagaaacagtctcttagagttgctgggaggcagccatatggttaacttttttttttatgttaactaatcagttatttcaaattgcaaaagtcagcaatatgttcttgcatatttatttgtttacttattttttatgtttttcagacgaagtctcactctgtcacccaggctgagtgcagtggcactgttagggctcactgcagccttgaactcccactctcaagtgatcctcccacctcagcctcaagtgatcctcccacctcagcctcctgagtagctgggacttcaggtgtatatcacacctggccttttttttttttgtagacaggggtcttgctatgctgcccaggctgatctcaaactcttggactcaagcaattctcctgcctcaaattcccaagcagtgggattacaggcatgagccacggcgcccagcctttcttacatatgtaaaaatactaggaaagggatccttttatggcagaggacttgtatcactaaggtttttttgtttgtttgttttgagacaaggtctctgtcgcccaggctggagtacagtggcgcaatcatggctcactgccgccttggcctatcgggttcaagtgatcctcctgagtatgggaccacaggtgtatgccaccacacctggctatgtttttttttttttttgtagagatggagtcacactatgttgtccaggctggtcttgaattccgagttcaagtgatcctcttgccttggcctcttaaaagtgttgggattacaggcgtgagccactgtggccagccactatgttttttttgttttgttttgttttgttttgtttttgacagagtctcgctctgttgccaggctggagtgcagtggtgcaatctcgggttactgcaacctctgtctcccgggttcaagcgattctccttcctcagcctcccaagtagctgggactataggcgcgtgccaccacacccagctaatttttttttgtatttttagtagagacggggtttcaccatgttggccaggatggtctcgatctgttgaccttgtgatccacccacctcggcctccccaagtgttgggattacaggcgtgagccaccgtgcctggtctatggttttttttgttttttttttttttttttgagacggagtctctctctgttgcccaggctggagtgcaatggtgccatctcggctcactgcaagctccgcctcctggattcacgccattctcctgcctcagcctcccgagtagctgggactacaggcacccgccaccacgcccggctaattttttgtattttttagtagagacgggatttcaccgtgttagccaggatggtctcgatctcctgaccgcgtgatccacccgcctcggtctcccaaagtgctgggattacaggcgtgagccaccacgcccagccaggcctatggcttttttttttgagacagagtttcactctgtcgcccaggctggagtgcagtggtgcgatctcggccactgcaacctccgcctcccaggtccacgccattctgcctcagcctcccgagtagctgggactacaggcgcccgccactgcgcccagctaattttttgcatttttagtagagacagggtttcaccatggtctcaatctcctgacctcgtgatccacccacctcgacctcccaaagtgctgggattacaggcgtgagccaccgcgcctggcctgtggtttttaattgtcctgatttcatgttctgtttctttcttaacagaatcagctcctatttttattgatcacagatgctatattcttttatatttattttgtacttattaaaacaattattcatgatatgaccataaccagcaataatccatgaaattattgtggcttaataaatgatggcaatgaagatttcactcctgtgtagctccttctgtctgactctgtgttaataattttagcaagcaagacttgagctatatgtggctactgaggatcacagccaaggagtaaagaagatgaaagaatttgatgaccaccaatcatggccagaagttgatttgttaatttgtactttaataagtcatggtccattaggatcttgctaattcctgtttcattatgcatgggaatttcttgagtaattaagtaaggttgatgagctttttgtttcatcaacagatattcgttactaacccactgagtcagttagctcaggctaaaaagcaggctgcagaatgcaacttcaagatggcaatctcagcctcaacatggctcatgttatgtgtcctgggagggttgaccactggtgtgctccacattctgttcattctaggatcctgaaggaatctctccaagctgggacagatgggtctcaaagcagagagaaaacagagatggtagaaccgtatgttgtattagtccattttgcattgctataaaagaatacctgaaggtgggtgatttatgaggaaaataggtttatttgggttgtagttctgcaggctgtaccagaggcatggcaccagaatctgcttctggtgagggacctcagggagcttcgaatcaaggcagaaggcgaaggggagcaggtttcacatggtgagagagggaacaagagggaggggaggaagtgacaggctttttttaacagtcagatctcatggtaacaatatgagcgagcacagcgtctagatgttcatgagggatctgtctttatgacccagacacgttccactaggctccgcctccaatactggggatcaaatttcaacatgagatttggaggggacaaacatccaaactacacaggctattttcactcacattttattggccaaagcaagtcatatggctaagttgcactctggacccacagtgaaaggggcagtgaatgtttttgcaataatatctgccacagtgccttctgacattttaaaaattgtggcaaaaacccgataatattttctaccttaaccatttttaagtatacagtacagtagtgttgactatatgtaaacggttgtgcaacaagtccctagaatttattcatcttgtaaaacaaactctatactcactgaacttgcctttcccccgcccctctctagtccctggccaccaccactcttctaagagtttgatgacctcagatacctcatataggtaaaattatgcagtatttgcctttttgtcactggtttgttttacttagcataatttcctaaaggttcatccatgttatggcatatggcaggatttccatctttctgaaggctgagtagttttccattgttactaacacactgagtttgcttaggctaaactgtatatagcactatttatccattcatcagtcagtggacatttgggttgctatcgattgtgaataatgctgcaatgaacacagatgtgcaaatatgtctttgagattctgttttcatttcttttgtatatgtagccttcccacattgttttttaaaaaatatttattatttatttatttattatactttaagttctagggtacatgtgcacaacgtgcaggtttgttccatatgtatacatgtgccatgttggtgtgctgcacccattaactcgtcatttacattaggtatatctcctaatgctatccctccccgctcccgccaccccgcgacaggcccggtgtgtgatgttccccttcctgtgtccaacgtttatttatttatttatttatttatttatttatttattttgtgttccattaaaactttatttacagaaacaggctatttgccaatattttaatctattaaaaattactcacgttggccgggcgcggtggctcatgcctgtaattccagcactttgggaggctaaggcgggcggatcagagagatcgagaccatcctggctaacacggtgaaaccccgtctcattggcctgatgaatctttcatatttaggtggttttcttgtaaagccatctccaacaaagcacacgttagtaactatcctcttccatgccttctttcctgttcgaataacttttaatacttctgcttctccctgggcacgtactttaggcagagggacttcccattttcccgccttctcttttcgtttctgtttaatcatattggaaagtactttagctcgagattgtccctctctgtccagcagataggcaggtactgctccctgtggagtcttttcatcattcttttgtttggtgtttttcttttcatgcatctttgatagtctttttttcatttatattttctcagcatggcgctgtttatgttaaagcttagccttcagaccaatcattttctttgccttctttgaacgttcatgagcctctcgactttccttctttctctttttctcatggtaatccaaacggtatccatagcgtttacggtgtaattcaatatattcgttctgtggcatggtgacggccgcagagccgccaggagcagcccctggggtgcgaaaatgctctcaattttcgggtctcaaagacccacaagcccacgccacgcaggccgggacaggaaagctatttatttatttaataatagagatggggtcttgctatgttgcccaggttggtctctaacttccggcctcaagcgaccctatcacctcagactcccaaagtgctaggattacagatgtgagccattgtgcctgacccccacgttctttttttttttttttttttttttttttgagatggagtcttgctctgtcacccaggctggagtgcagtggtgcgatctcggctgactgcaagctctgcctcccgggttcacgccattctcctgcctcagcctcccgagtagctgggactacaggcgccccccaccgcgcccagctaattttttgtatttttttagtagagatggggtttcactgtgttagccaggatggtctcaatctgttgacctcgtgatccgcctgcctcggcctcccaaagtgctgggattacaggcgtgagccaccgtgcccggcccccacggtcttaatcattaaaaaagttaactgtaatggctaatgagaatttaccaacataaaacatatttcttcagttattaataatttttaggtgttcctgtttagtacgctgcctgaatctaaagactaaaggaaaaataggtaaagacttcattaaatcttttgaaaactttctttagactttcagaataaaagtagtaagtgtacaactaatttgaatattcatggtataagactgaaatcaggtcattaagttgtgctgaatatagattttaatatctaaggattttcataaaacatgatttatcctagaagataattcatccatgtagggattgaacttttctttcaatgtgaaaatttgattgaagggaattttgctgtagcttattactatccttcaaggtttcaggctgatgtttaagcttttggaaggctttgagttttgatattgaaagccctaaaagcatcttcattttagaagtagttgtatatgatccttttatgattttttttcatgtaacttgtatgtgtgaaagttcacttaactgggaaacaaagtttctttcaagtaaatgtttattttatattagttttagctgtatagaaaagctgtgaaggtagtacagagagttcccataaactgcacacccagcttccctgttaacatcttacactaatgtggtacatttgttaaaaattaatgaaccaatgttgatgcactagtattaactgaatcccatagcatattcagatttccttaggtttttaatcaatgtaaaattacataacattaaattagtcattttaaagtgtacaatctagtgacatttagtacattcataatgttctaagagttccaaaacatttttatcacctctaaagaaaacttgatctgttagaccacgattccctgttccctactacatgcagaccttggaaaccaacaacctactttctgtctctatggatttacctattctggatatttcattaaatgaagtcacataatatgtcgccttttgtgtttggcttctttttttagcatactgttttttaggttcatccactttgtagcatatattattttcatggctgaataatttcattatatatgtatacatattccattgtgtatgtatatgtatatatatatgatatcgatacaaaactatcaaacttttccacagtggctgagccattttacattctcatcagtagtatatgatggttccaatttctctacatttttaataaaaaaactatttcctacttattttcctttttttctcccagtatagtataacctcgttggtgcaaagcagtatctcattgtggtttcaattagcattttcctaaatgatgaataattttgaggatttttttttttttttttttttttgagacagagttttgcttagttggccaggctggagtgcagtggtgtgatctcggctcactgcaacctccgggttcaagcgattctcctgcctcagcttcctgagtagctgggattacaggcactcgccatcatgcctgactaatttttgtatttttagtagaaacggggtttcaccatgttggccaggctggtcttgaactcctgacctcaggtgatccacccaccttggcctcccaaagtgctgggattacaggcgtgatacactgcatgtggctgattttcagcatctttttatgtatttgctggccatataactgcatttgttggccatataactgctttggagaaatgtctgttcaagtcatttgcctattttttaattgagttttttgtgttttttgttgttgttgagttctaagaggtctttttatatccttgatactaggcccttatcagatgtatggtttgcaaataaatatctcccattctgtaggatggcctttcgttttctttgtaatgtcctgtgatgtacaaaagttttacattttgattcagtccaatttattcttttgttgcttagctcttggtgccatatctaagaatccattaaaaaaatacaaagtcaagaagagtcatccctgtttttattttaagagcattacagtcttttttttttttggagacggaggctcgctttgttgcccaggctggagtgcagtggcgtgatcttggctcactctgttgcccaggctggagtgcagtggcgtgatctcggctcactgcaagctctgcctctcgggttcacgccattctcctgcctcagcctcccgagtagctgggactacaggtgcccgccaccgcgcccggctaatttttttatttttagtagagacggggtttcaccatgttagccaggatggtctcgatctcttgacctcgtaatccactcgcctcagcctctcaaagtgctgggattataggcgtgagccactgcgcctggccaagtttttgtacttttagtagagacggggtttcatcgtgttagccaggatggtcttgatctcctgacctcgtgatccgcccgcctcggcctcccaaagtgctgggattacaggcgtgagccaccgcgcccggccttgtttttgtttttttgagacagggtctcactctgttgcccaggctggaatgcagtggcatgatcttggctcactgcaacctctgcctcctgagtagctgggactccaggcatgtgccaccctgctctgctaactttttgtatttttggtagaaatgagatttcaccaggttgcccaggctgatctcgaatttttgggctgaaacaatccacccaccttggcctcccaaagtgctgggattacaggcatgggctaccgtgtccagctaagagctctatagttttcgttcttatatttagctctgtggtacattttgagttagtttttgtatatagtgtaaggtaggggtctaactttatccttttgtatatggaaatccagttatcccagaaccatttgttaaagagactattctttctctgttgaatgttcttgggtcccttgttgaaaatcaattggcctttcatgtataggttaggttctgtactctaaattttatttcattggtctatatgtctttccttatgccattaccacactgtcttaattgccagtgcttagtagtaagttttgaaattgggaagtgtgagtcctcctgttttgttctctttttcaagattattttggctatttggagcctcctataattccatatgaacttgaggatagccttttccatttctgcaagaaaaaaaaagaaaaaaaacccctggaattttaatagagattgcattgtggctgtaagattgctttggatagcattgctatcttatcaattttaagtcatctaattcttgaattgtatcctataagtttggtatgttgtgtttttggtattatttgtgtcaaggtattttcttttttcccttgtgatttcttctttgacccatcggctatttaagagtgtgttgggctgggcacgggggctcatgcttgtaattccagcactttgggaggccaaggcgggtggatcacgaggtcaggagttcaagaccagcctggtcaatatggtgaaaccatgtctctactaaaaatacaaaaattatctgggtatggtggcacacacctatagtcccagctgctcaggaggctgaggcaggagaattgctggaacctgggaggtggaggttgcaatgagctgagatcatgccactgcactcgggcctgggcaacagagcaagactccgtctcaaaaaaaaaaaagtgtgttgtttaatttctatatatttgttcctgttttccttctgtaaagtttcattccatgaggtcagagaagatacttggaatgctttcagtcttttaaaatttagtgagacttttttgtggtctaacgtatggtctatgttggagaatatctttgtggatcttctgcctagttgtcttattcattattgaaagtagggtattaactgggcacaggggctcacgcctgtaatcccaacactccgggaggccgaggtgggcggatcacttgaggccaggagttcaagaccagcctggccaacaaggtgaaaccgtctctactaaaaatacaaaaaaaaaaaaaaaaaaaaaaaaaattagccaggcgtggtggtgggcacttgtaatcccagctactcgggaggctgaggcaggagaatcgcttgaacctgggaggtggaggttgcagtgagctgagactgcatcactgcactccagcctgggcaacaagagtgagaacctgtctcaaaaaaaaaaaaaaaaaaaaaaaaagaaagaaagaagtaaaggaagtagggtatcgaagactccagctgtttttgaactatttctccttttaattctgtcaccttttgcaggaggctctgttcttaggtgtatatatatttctaaaagttataagtttttctgtcctttcacagttctttcttcttttcttttgtttctttctttcttttttttggagatggagtctagctccgttgccaggctggagtgcagtggtgcgaactcggctcactgcaacctccgccttctgggttcaagtgattctcctgcctcagcctcctgagtagctgggactataggcgcgtgccaccatgcccagctaatttttgtatttttagtagagtcagggtttcaccatgttggccaggttggtcttgatctcttgacctcatgacctgcccacctcagcctcccaaagtgctgaaatttaagagatagggtcttgctctgttgcccaggctggagtgcagtggtgtgatcatagctcactatagccttgaactcctgggctcaagtgatcctcctgcctcagcctcctgagtagctgggactataggcacacaccactgcaccttgctaatttaaaaatttttttttttttggagatggcatctcacactgtctgccaggctggagtgcaggggcgcaatcttggcttactgcaaactccatctcccaggttcaagcgattctcctgcctcagcctcctgagtagctgggattacaagtgtgcgccactacacctggctaatttttttttttttttttttttgagacggagcttcgctcttgttgcccaggctggagtgcaatggtgcgatcttggctcaccgcaacctctgcctcccaggttcaagtaattctcctgcctcagcctcccgagtagctgggattacaggcatgcaccaccatgcccggctaattttgtatttttagtagagacagggtttctccatgttgaggctggtctcgaactcttgacctcaggtgatctgcccgcctcggcttcccaaagtgctgggattacaggcttgagccacgtgcccggcctaatttttgtagttttagtagaggcagggtttcgccatgttggtcaggccggtctcgagctcctgacattgtgatctgcccaccctggcctcccaatcagctgttaatcttatcgaggaccccttttacatgatgaaccactttcttttccttttgaggcctggtcttgttttgtccccaggctgaagtccagtggcgcgatcatggctcattgcagccttgacctcccaggctcagctgatcctccttcctcagcctcctgagtagctgggaccacaggcgtgtacccccacacttggataatttttaaattatttgtagacatgaggtctccttacgtttcccaggctggtctcaaactcctggattcaagtgatcctcctgccttggcctcccaaagtgttgggattataggcttgagccatggtgcttatccaagtcactactttcttgctgctttcaagattctttttgtcatttgacagtttgattacaaaatgtcttggtgtggatccctttatttttcttgaagtgtattgagcttcttggatgtttagatttgtgtcatatcaaatttgggaagttttctgtcattatttcttcaaatattctttccctttcctctcttgcctctatgactccagttatatgtatgttggtatgcttgatggtgttccataggcatcttagactctgttgatttcccttccttcttttttctttctgttcttcagactggataaattcaactgacctatcttcaagttggctgattgttctatcagttcaaatctgccactgaaatcctctagtgaagttttttttttgtttgttttagttattgtatgtttcagctccaggatatctatttgattcttttttataatttctgtctctttgttggttttctgtttgttgagacattgttctcctggtttcttgtcattctttttcctttttcttttccttttttttttttttttttttgagacagggtcttgctctattgcccaggctggagagcagtggtgtaatcatggctcactgcagccttgaccttgcagggtcaagtaattctcccacctcagcctcccaagtagcttgggagaagtgccaccatgcctggctaatttatttttattccttttagaaagggggtcttgctatgttacccaggcttcttgttctttgtccatcatttccattagctcactgaacacatttaagacagttgatttaaaatctttgtctagtaagtccagtgtctgttcttcttctcagactctttgtgttaatttctcctgtgtatgtaccatactgtttttatttcttcacatgctttgtaacattttgttgaaaactggaggttttgaatattataatgtgactccggaaatcagacccttccttctgagtttttgttgtttgctatgagttgtagttgtttagtgagtgttctaaactctttctaaattctgtgttctttgttgtgtttgttctctaaagtctctttcttagcctgtgttcagctgatgctttgtttgtttgttttttgtttttttgagatggagtcttgctctgtcacccaggccaggatgcagtggcgcgatctcagctcactgcaacctccacctctcgggttcaagcaattctcctgcgtcagcctcctgagtagctgggactagtggtgtgtgccactatgcctggctaatttttgtatttttagtagagatggggtttcgccatgttggccaggctggtcttgaactcctgacctcaggtgatccactggcctcagcctctcaaagtgctgggattataggcgtaagctaccacgcccgacactttgttttttgttttttagagatggggtctcactctgtcactcaggctacagtgcaggggcatcataactcactgtagccttgaactcctttgctcaagtgatcctcccacctgagtcactgggattataggctgagccaccactagtgttttgacagacttttttgaatacctagagcttccctccaccatcccccaaaaaagagtagacagaaaggaggacaaccaccttctcccagtctttgcagaatggctgtgttgggggacactgtggttgcttagccctgctgtttacaactctactgtagcctcatttcctgcttgtgctgagccgaaagttcagctaaagggtcttttcagatcttttctgagcatgcttcctgccctgggcatatatgcatgactttctaaattcctaaccttagtataagtggacattgttgaatgcccaaatttccaaaagaaactttctcccagcttttcctctcaggctgttggtgtgtctgtttgcttcaactgaaatcttttgccccaggtggctgcagattatttgccttacaagttttttgagcaataccctctgaagagacacctctctgccctgttccaagttagggaaagcaaagaccaatgtcttgtgtcagtcctttaggtaacccgcaggctcaaaacaggcaaacgcaattctttcagaatttcttcctctggaagcagggactaaaggagtaggttcccagactgagaatgcaggctgctgtcttcaagactgccactggggaagggaaagagagagggcaagtcaaaatgctgcaaagcttttctactgtttcaagttgcttttttattcagtttgctgagttgctataaatgtattttctggagttgtgacaaagctgatctgacagtttttgcttgattttttagtcatctgtggagggatgggccattggagttacctgcctcaccatttttactgatgtcccttaagaaaggcttttgctttgtttttagagacaaaacaaaaatgttttgtgctatgttgcttcgaactcctggcctcaagtgatcctcctacctcagcctcctaaatagctgggactataagtgtgtgccgctgcgcccagctcccaagaaagatttttgaaagttatattatgatacgttgctttaatgagtagcgttaaataaattatattaatgtttataaaaattatcaacaggatggaatccgacgtggtaggcccagagcagatactgtccgcgatttaataaatgaaggagagcattcatccagcagaatccgttgtaacatctgtaatagggtgtttccacgggagaaatcgctccaggctcacaaaaggactcatacaggtaagttgagcaaattttatagagactgccagaagtaacactttttttttttttttttttttttttttttttttttgagatagtctcgctctgttgcccaggctggagtgcagtggcgcaatcttggcttactgcaagctccgcctcctgggttcaagcaattctcttgcctcagcctcctgagtagctgggattacaggtgtgtgccaccacgcccagctaatttttgtatttttagtagagatggggtttcaccatgttggtcaggctggtctcgaactcctgaccttgtgatccgcctgcctcggcctcccaaagtgctgggattacaggcgtgagccaccgcgcctggccagaagtaacacttaactgaatgctgatttgatattgagtaataaattaactttttagttgctttatattttcttattaccactattagttgtgaagttttttaaaaaggcagtatagtcagtttctttttggtggagagtggtggttttatgaatactggttacatgtgatttctaaagttatcatggtaattaacctagatgtcatagtcatgttattggcaaatttagttttaccccctacttgcccaaattgtacttgatatacttttatctatgtaattgttaaaattcatctgtaggccaaaaacattaattgtcaagtttttaatagaatgtttagagtcctcactgtgctatcaggacatttgacctaagcattaaatctgtggtgaactatggtaggcagccatctcaagattatggtacatctttatttgcatatggaaattatatttgcattttaaatatcatttagagagccaaaaaaaaaaagtatagagggcccttgttctcgctataaagttggccccaaaggaaggaaccttatagttcatctaatagtttacaggtgaggaaactgaagtgccaaaaatccaactactaccggcttacaatcagtctctcatacctttaaagctagagctacactgccccatacagtagccactgtgactcctgagcacttgaaatgtgggtagtctaaattgagatgggcagtaatataaaacatacttaatatgaaaaaaagagtaaacaataatttttactgttgattatgtattgaaatgacacttttagataaattggattaaataaaatacattattaaaattaatttcatggctgggtgcggtggctgacgcctgtaatcccagcactttgagaggccgaggtgggtggatcacctgaggtcaggagttcaagaccagcctggccaacatggagagaccccatctctactaaaaatacaaaattagccaggtgtggtggcacattcctgtaatctcagttactcgggaaactgaggcaggagaatcacttgaacccgggaggtggaggttgcggtgagccaagatgtgacattgcactccagcctgggcaacaagaacaaaactcaatctcaaaaaaaaaaaaaaatttatttcacctctttctctttactttttctaatgtgccttctagaagtggttcatattgtctttcattgggcagtactggtttagaacttaagcctgtaaccctcagtcccctatttttttccaccatgtttatggtgctcacctgtttctcacttttttttaacttgtggtttttgaaaatatatatttaaatgatatgatagaatagaggttttttttaagttaaatccctggaaaggggtaatgtttgaattttaaatcattataaactaaggtgtctagaagttttgactttggataccattagtaaaatgattacttaatgaaacattctaattttgagaatttttatatatttttttcaatctaaatattctaaaatatcccctggataactggtttgtaggccgtagagttgccagtgtgggtaagattcaagactatgtggcagaatgaagaaagggctgagtgccgtcctgatcaccactacctcactgtgtcacctgataccccaggcatcagcctagatgtctgtacatcaaggaactgaaaggaggatccctaagggatagttgagccctattagcatattttgtaaaaagcttttcccttactattttaaacaatccccctatatctgtgttttattttaacttgtattcaactatcacaaccatttattatgtctctaaataatgagaaatttagggaggacttgttattctttgagttatactggaaaatgcaaactaatgtacaattgttgattaaataatgtttttttcaataaataatgtttaattatcattaacaaatttttcagcacttgagcctggcactgtgttgtctataggaatttaagtgaagtataaggtactaggaatctttgcaggagactaccatgacacataaacaacacaggaccccaggttaatgaaggtatacaaagttcaattatttggaggtagataggaagaattcagttatttggggagataggaagaatctcactgagagcctacaggattgggaagatttgaatgggcagagaaaataggattttcaaggattagaacaagatgaggaactgcctcctggctggaatgattctccaggagggaagtaaggataaactctgccccttaaccccagtagctaatgaggttggtgagattgcctagagtgccgatcttagaggaccatttaagtcagcagataatttttagttgtccaaggtgtgtaataggatttgggggtggttcaggagctagttggtatgacaaaagcagatttctatgccagctactctgggattgctgtgcagggggagaaacaagaggccggccaggaggctgtcggagggttcatcctagtgggagggctgcccgtctgaccaggggaagctgagtgggaaggcaggagtgggtggaagacatagtgaagaatcagcaagatctagtgatttggagtatgagggagaaaaaatatgggataagctcaagatgataacctcaaggcctaaagaatagattgtgttccccagcagatagtcattgatgccacccaagtgctgccattagcatttccacctgcagctcagtaggggccatgacatgttttattgttattgggagtcatgacctatataaaggctgattctctccccatccccctcctcttctggccttattatctcagatataatatctaacatctgtctacttaggtgagaggccctatctgtgtgactatccagactgtggaaaagcctttgttcaaagtggacagctcaaaacacatcagcgtcttcacaccggagagaaaccttttgtttgttcagaaaatggtacggtgttagaagttaagtttatggaataactagttgtgacttaacagttaaaatatcctttccttgaatttttttgaggggaaagattttttaatataaattttataaaactttataagctttcttctttgataattgtgatacatgctgaatttctcagaaatgattgattttaaaaatttgttggttttgatttttgtgggtacacagtacgtatacatatttacagggtacatgagatacttgatacagacatgcaatgcataataatcacatggtaaatgggctatccatcctctcaagcatgggtcctttgtgttacaaataatcccgttatactcttaacttattttagaatgtacagttaaattattattgactatagtcaccgtgtgctataaaatactaggtcttattcattctttctatttttggtacctattaaccatccttacctgcccctcatcccccagttccccttcctagcctctgggcaccattgttctactgtctatctccacgagttcaattgttttgatatttagatcccacaaataagtgagaacaagtgatgtttgtctttctgtgcctggcttaagaaataattgatttttaaataaagtaatcctttttgatgaaaccttaaagggcaattaaagatactatatccagttgtaggcagtagaaaaatctgtaaaagtaaatacagcctttggagcaacattttaaactttttaattattaaagtgaagtaagcatattatcctaagtgattttcttaatcttttatcagtttctaaagatgcacatttttatgcagttacagtatatttgaagttccgtgcaatctgtcctgttgctctgtaattttcttgattattacaaatgttgcaaaagtctgcaaagttttcatccagcaagtttgcttaagcctatatgcaatggtttcctctatgttgaataatgaatatttgtttatttattttttgagacggagttttgctcttgttgcccaggctggagtgcaatggcgccatctcagctcaccgcaacctccgcctcctgggttcaagcgattctcctgcctcagcctcccgagtagctgggattacaggcatacgcgaccatacccagttaattttgtatttttagtagagatggggtttctccatgttggtcaggctggtcttgaactcccaatctcaggtgattcgtccaccttggcctcccaaagtgctgggattacaggcgtgagccactgcgcccagcatttatttatttatttattttttattgttttgagatggagtctcacttttcgcccaggctggagtacagtggcacgatcttggctcactgaaaccttcgcctcctgagttcaagcaattctcctgcctcagcctctggagtagctggaattacaggcttgtgccaccatgtccggctaatttttgtatttttagtagagatgggggaccatgttggccaggctggttttgaactgctgacctcaggtgatccacccgcctcggcctcccaaagtgttgggattacaggcatgagccactgcacctggtctgaatatttaatttgttttttaaatgttcttgttaccaacaaagctgaggggaatgttttcacacgtgtagctttgttcatcttttgggatgcttccttatgttggaatccacaaatggaattctcgggtctgaggttttgaactccacccgacccctgcgatggagtctggctctgtcgccaggctggagtgcaatggcgtgatctcggctcacggcaacctctgcctcctgggttcaagctattctcctgtctcagcctcctgagtagctgggattacaggcagagaccaccacacccggctaattttcgtatttttagtagagatggcattttgccgtgttggccaggttggtctctagctcctgatctcaagtgattcgcctgcctcggcctcccaaagtgctgggattacaggcgtgagccaccacgccctgccattttgaacattttgaactcatgctaataaatcactttccaatggtgttggacacacatggccacgaccaaaatgtgactgtcttcctgtccccgctctagcactgatgagactgtgctggtttgattgttttctcctccaaattatagatcctaaatttcaccatattaatttacttttctggataccagtgaaactgaatgttttccacatgtctatgtgctggatgtccagatcctgacaggtgttaaccttgtgttttgaaggctgcctgagcagattcacccatgcaaaccgccactgtccgaagcacccctacgccaggctgaagagagaggagcccacggacacactcagcaaacatcaggctgccgacaacaaggccgcggccgagtggctggcgaggtcaggaatgctgcctttagtccaccgtgaagatgcacagcgcgggctggggctatgtcagggacctggacatgcctctcattttaaataagctgcatttatacacattttataacataattagaaatgacccctgattttctataaaattgttgtgagtggtattaggatcttaggatctgtgtgtgatagaaaattacaatataattagagtgcccagactacagtttattttaaaaggaagagttttcctattttgaaaaaatgttttatatgtattgtatttcattcgtcatgaatgcaacctttttcattttctttatgttagccttagctacgtgccaattaaaacagggatagacagccgaggtgggtggatcgcctgaggtcaggagtttgagaacagtctggtcaacttagtgaaaccccatctttactaaaaatacaaaaattacctgggcagtagtggcacgtgcctataatcccagttattcgggagattgaggcagaagaatcgcttgagcctgggagacggaggttgcagtgagccaagatggccccactgcactcttgtactccagcctgggtgacagagtgagaccctgtctcaaaacaaagcaaaacaaaacaaaaaaacaccagggatagatgttagtggttcttcttaggtgaggttccaaaaacaccaatttaattttttccaatggcaacaagggggccagtataaaagaatttctctaaggatatttcggttgaagggcctgtctgctgtacacgagccagcagcagctgctcaggcctcacccaggcttcactggctgcttagggtaaagtccaggattcctagctgtgctgccatagccctgcctccctctgataaggcaactgtcccctgccatgctgggctgtgggtttctcaacacaggtgcctttgtatgagggcctgtgtgcaccctgcttcctctgcctggagcactcactccccacttggctaagcctcttgctcaccttcatctcttactcaggaaggcctccctgacctgctcagcaacaaacgggctgggaccaacttaacagatgctttcattttccttttcaaaacatccatcacacatttatttgtttattttataccttccctgccagactgaaagcttccccgggcagggatatttgtcttgtttattatggtaagcctagggcctagcagagcttctgggccttgataaatatttgaaggaataaactctgttttgtttggataaaaatacataagaattatataatggaatctggaaatactatttgattattcacgtccagggaaatttgttagcactgtcatagaaattgtttagatggacaattctaggggtaccttaaactaaatatctccatcacttcctcccctcctctttctcctggttagctcctactgccccattatttctaattgtgtcccagccagaagcttactggtcatccttgtctttttttttttttttttttttttcgagacagggtcttactctgttgtcaagactggactgtagtagcaggattattagctcattgagccttgacctcctgggctcaagtgatcctcccacttcagccccctgagtagctgggaccacaggtgtgtgccaccatgcccagctaatttttaagttttttgtagagactgggtcttgtcacgttgcccacgctggtctcaaactcctggcctcaagtgattctcgcaccttggcctcccaaactgttgggattacaggcatgagccaccgcacctcgcctccttgtctttctgctgtctactcagtgaccaagttatgacatctacctccttactaactcaaattcagccacttgaatgctctcaatccattttccatgctgctgccagagggatctttctaaaatgtcagtatgatcctcagtctaaagcctaaaccctttattatggaattcaaagtccttccttacctggttcctgctgacttgctgaacttatcttttgccattctcctcttctagtcatccttcaagtcatactgaacaatttgcactttctttttttagacctctgtgggcattgccaaaacttttccactttaagtagtctggatttcctgaaatttggtagttgtatttctttttttttttggtatgtaattttaaaaacagctttgttggggctgggtgcggtggctcacgcctgtaatcccaacactttggctgaggtgggtggatcacctgaggtcaggagttcaagatcagcctggctaaatggcaggaccctatctctactaaaaatacaggcctggtgcggtgcctcacgcctgtaatcccagcactttgggaggcctaggcaggcagatcacctgaggtcgggagatcaagaccagcctggtcaacatggtaaaatcccgtcattacactctagcctgggcaagaagagtgaaactctgtctccaaaaaaaaaaaaaaaaaaaaaaaaattagccaggcatggtggtgggcgcctataattccagctactcaggaggctgaggcacgagaatagtttgaacccaggaggcgaaggttgcagtgagccaagattgtgccactgccctccagcctgggtgacaaagtgagactctgtctcgaaaaataaaataaaaataaataaaaacagctttgttggtatataagtagcatataagaaattatgatacatttaaagtgtacagtttaatacattttaaagtatacaatttgatacatttttgacatgtatatactgtgacaccatctccacaatcaagatggtgaacatatccatcatttccaagtttcttcgtgccccctttgtgaactgaactacacattcctccctgtcccccttccccccatacaacactgatctgctgtcactataaaatagtagttttatacaaatgtagtttgtttattctctcgatgggcatttgggttatttttggctattacatataaagctactatgaacattaatatacaaggctttgtatggacagttttgtatgatctgttactgtcatttaaaatgcatttttcttttttttttttttcttgaaacggagtctcgctctgtcaccctggatggagtgcagcggcccgacttcagcttgctgcaacctccgcctcccaggttcaagtcattctcctgcctcagcctctggagtagctgggattacaggtgcctgccaccatgcccggcaaatttttttgtatttttagtacagaggggttttcaccatgttagccaggctggttttgaactcttgacctcaagtgatctgcctgccttgcctcccaaagtgctaggattacaggcgtgagccactgcgcccagcctaaatactcatttctttagttaccaaagagttgagcatttgcattttctcttgtaaattatcagttggccatgtaacagaataagggtagtgtttttaagtttttgaataaactctgtgtcacagatgttaatcactttttcatagtttgtgggtttaatatttacagcgttaacgctgtcagaagttaccatccctctgtagataggataaataagtttctaaagactgttttttctactatttctgtattttactcaagtccatttcacacaggctctttaaggcggtgatagtttaatggcaaaaacgtgatttgagagtgagtagaagatctagaactgccaggtttattgtggaaacctgagcacgtctcttaacctcgttgaacttcagtttctttcctctataaataggaaatttatgttaaatcactttataactttataaactgaaccacataaaagtaatattgtggtatggaactttttaaaagaaaagtaaacatttggaaatttcatgtctgccatgtaactaatgttgctgcatttcacataggtattgggaaatgagagagcagcgcacccccactttgaaaggcaagctggttcagaaggctgatcaggagcagcaggaccctctggaataccttcagtctgatgaagaggacgacgagaagagaggggcccagcgccggctgcaggagcagcgggagcgcctgcatggagccctcgcgctcatagagcttgccaacctgactggggcgccactccgacagtagcttggacactgactcttccactgtacaaaagtactgcccagcatacttaaaaagtagatccttgggcataagctaagcaccttatttgcttatcataggctgctattctgtagaaatttatgaagaatgttattgccccagaatatggggtgagagagaactgcacttttttaatatggaaatgaattcatcgtaaagtttaaaatattttgtaaatatggactgcacagtacagggtagaaaactacatattgtgggaagctagattttgcaagtttaatgcattcattggaagcagttctcacaggaagcactttctgaataagacacttgtttgaaaaacagaatggtacaaatagccaaagaagattaaaacagattatttataagatcatttttaacaatatatattagtatgtttaacaatactgtaaacactgaagcaagcaagaaagtataaaatatgtaagatagataattttaattgcaaaatactgtgcccactaaggctagagaaatgggaggctattttggaagatgttctaagtaatggacttagaagaaaatagatatttgaggctcttggtaagatgcacaatagttcagaatttttgaaattggagcaaaatcagtcttattctatctggggctttacaactcagtataatgtttaagtttgaaaagcacttgtcatccctagcatgttaacttgggaacttttgcacatttcatatttctcatttgctgaaattgagtgattaatcttgcaaagtctaggtaacatagtaattggtaattttaaaaatacatattaagggccctgtaatgagatttggcacttggatttttactaaagggacacctgcagggttgttttgtagtgaaatgttttagatcttttgttagcaaacactacattttaattgtactgcttgtttagaattattagcaaatggaagcctccatatttatattttcagtgcataaagccaccttcttgctttacttcagagtaacatgccaagctattttgtgttcactaaatttagctatcagttaaacactgcagaaaatattagctactcaaataagtaggcttctgaaatagttttaactgcaagtgtgttaacttgtgtggtggtttgaagccatttttccaaataaagttattaaacaccactttatgtactgaagcatgaacagaaaaatcaagagctgagcagaccacctcctttatgtaggcaaaacttccatcattttggcttttgttctaaacagaactaaatgacatgcatagcatggtaacttacagatcgcttaattggagtaaaactcagagtaatagagggaaatatgggctcttcagtgcctttttagcttttttgagttgaagacgttcctacagatgtagtttaaacattacaaagtaggcttctttatccaaaaatcccaatgtgtcatagtacacagatagtttaaaatatgtagccacggggaaggggaggcatgtaaatgtcttgaagaggagaaaaagtatgaaagaagatacgatagttacgaataatgtgtatgatgaggacatactttaaaaatgtaattcctctgtacagtaaattacaaatctttagggatttttttgtaataagagaatttatatttgtaatggtctaagaatttttttgtaatgtggtatatagaattttaatttggagcacttataagctggtaagagagactatagcatctgaattatcttggtttatgtttcagcatttcctctagaatttttgctctcaaatatgtgatttaatgaactaaaaacaacactcatcagtcttgggaaatttgaactttgatcaacttaactaaagaaggaagggtagtaagaatttttcaaatacaaatatttgccaattcacagatgataacatttaaggccttcaaaagtaagggtttttccttgtttctccagtcagcttttgtcaactctaatagttttttcataaacattttttatttgtataattgcaacagtttaagaaattatcacaactatttagaaacatttaaaatgttctttttgat

SEQ ID NO: 928 - DNA, 556 bp, Homo sapiens
aaaccctgaaagttttggaatatgagaaacgggaccgagaaatgtgtgagtcccatttttcagccttttcctccttttgctcagcagacactgaatataatccacaggcagtacagacttattcttccaaaggatttattatgtaatcttgtacaagcctcaacttttctcatttataaaatgggaaaaatatcttccttacccaattgttgagtgaactgtgaaacatccatatgtattattgtgtatcagtacatatatgctatttttgtagtaggcctccagaaaatggaggctatatactgtttcatttcttaaaaggatactttcacttggttcaaagttcaaaagatagttatatattgtatttcttgaaatcttttcacttctgttcccagccacacaatttccctccatgatccatgtttcttttgcatcttgccagatattttatgtacgtctaaaagtaaaaacgtattttccccactttaacaattttacataaaatcacactattgcttgttttgccttttaaaataaaaatacatttttgaaa

SEQ ID NO: 929 - DNA, 288 bp, Homo sapiens
tttttgagacggaggcttgctctgtcgcccaggctggagtgcagtggcgcgatctcgcctcactgcaagctctgcctcccgggttcacgccattctcctgcctcagcctcctgagtagctgggactacaggcgcccgccaccacgcccggctaattttttttgtatctttagtagagacggggtttcaccgtgttagccaggatggtctcgatctcctgacctcgtgatctgcccgcctcggtctcccaaagtgctgggattacatgtgtgagccaccgcgcctggcc

SEQ ID NO: 930 - DNA, 13409 bp, Homo sapiens
ttattgtgcttctgctggaagggtctcttgtatgggcgccccgtgaggacccagtccttctccagggcattcgagtctccattgcacaatggccagccctggtgagtggcttttactgggtgggaacatgtctgagctttactcctataatataactatgacatgttagggacagagtatgtgtaagaactacatactttgtccttaacgtacatttattctgaagttactaatgcaaaaattaggagcagtcttttctcctttgtcctccaaaatgttttatattaggtgatatttgatatgaaagaatttttttggccagacgcggtggctcacgccttgtaatcccagcactttgggaggctgaagcaggaagatcccttaagctcaggagtttgagatcaccctgggtaacatgccaaaaccccatctctacaaaaaatacaaaaattagctaggtctggtggcacatgtctgtggtcccacctacttgtggggctgaggtgggaggatggcttgagcccaggaggttgaggctacagtgagccgtgattgtgccactgcatccagcctgggggacagagtgagacccctgtctcaaaaacaaaaaaaacaacaatgaaaagaattttttcacctttagtcttttctcagagcaaggttttgaaacattatttgtaacctttaaagtttttttttcaattatggagtgaaaatagcattataaaatttattttattttttgagacagggtctggctctgtcactcaggctggaatgcagtggtgcaatcagagctcggtgcaatcagagctcaccgcaacctctgacccccaggcttaagccatcctcccacctcagcctcccaagtagctgggactacagacgcacagcacggcacccagcctaatttttgtatttttttgtagggatggttgctcatcatgttgcctaggctggtcttgaactcctggtctcaagcagtccacctgcttcagcctcccaaagtgctgggattataggcatgagccactgtgcctggctgtgtgttataaaatttaattgtgagagtatccatttgtttctgtctgtcttattagcaaagtataggtataaatggtaacttctaaaaaatcctgattttcatgtggctaaccaaattaaataaataatattcaaaacaatttttttaactgattgatggtatatgtcatcacttactaaactgtcttttctttttctttttgtcttttgttttttgtttttttcttgagacaaagtctcaccctgtcacccaggctggagtgcagtggcacgatctaggctcactgcaacctctgcttcccaggttcaagcgattctcttgcctcagcctcccatgtagctgggattacaggcatgcgccaccatgcccagctaatttttgtatttttagtagagacagggtttcaccatgttgtccaggctggtcttgaactcctaacctcaggtgagccactacgcccagccgtttcatttgtttttgttgttgttgttgttaagatggagtttcgttcttgttgctcaggctggagtgcaatggctcgatctcggctcaccaccccgcctcccaggttcaagcaattctcctgcctcagcctcccgagtaactgggattacaggcgcccaccaccactcccggcttattttttgtatttttagtagagacagggtttcactgcattagccaagatggtctcgatctcctgacctcgtgatccacccgcctcggcctcccaaagtgctgggattacaggcatagccactgcgcccggcttctcatttgtttttaaggccactttccagttgaacttttaggagaagctcttgtataataagtgcatgtgaggtctcttcatgacttttttataggctatttatttatgaaatggtaatatgaattaaccatgcatatttatgctgttaattattttataaatttcacaaagatttcaagagttctgagatgataacagtataactctttattctgggaatttactataatttagctcccttgaagcctaataagattagcctgatccctaggcagaattaggagaatttctgattcctcttgtcctttttagccaataagagtattgagctgactttctgcattagttagcttcccatgactatttgaggggtagatgctaggttgggaatgtttccaaggacttatgctttagcttatctgtatttactgggatgaaagatataataattatttctttgaagttagagatttgtttgaattgctgtttttttattcccaagttctaatcaatttcttgtcattgtacttcacagacttttactccccttgtagataaactgggtttgggttctgtggttccagtggaatatcttctggatcgagagcttcggttcctgtcagatgccaatgggttgcatctgtttcaggtatttaacacttgctttagtcttgagcctattatttttttcgctgctaatttctttgttgatataaacataggtgtttctccttttactgggtgggaacatattagcatttcttttattacttcctccaataaatatgctgtgccttttttattttattttattttatttatttatttatttttttttgagacagagtctcgatatgtcccccaagctggagtgcagtggtgcgatctcaactcactgcaacctccgcctccccggttcactccattctcctgcctcagcctcccgagtagctgggactacaggcgcctgccacaaagcccggcttatttttttgtatttttggtagagatggggtttcaccatgttagccaggatggtcttgatctcctgacctcgtgatccgcccgcctcggcctcccaaagtgctgggattacaggcgtgagccaccacgcccagcctattttatttttttgagacagagagttttgctcttgttgcccaggctggagtgcaatggtgtgatcttggctcactgaaacctctgcctcctggattcaagcaattctcctgcctcagcctcccaagtagctgggattataggcatgtgccaccacacccagataatttttgtattattagtagagatggggtttcaccatgttggtcaggctagtctcgaactcctgacttcaggtgatccacctgccttggcctcccaaagtgctgggattacaggtgtgatcaaccacgcctggcatttttaaatttttatttatttatttattttgagaaagccaccttggctggagtgcagtggctccatctcgcctcactgcaacgtccacctcccggtttcaagtgattcttgtgcctcagcctcccaactagcttgggatcaaaggcacatgctatcacatctggctaatctttgtagtcttagtagagacggggttttgccatgttgcccaggctggtctcaaactcctggcctcaagtgatccacctgctttgccctcccaaagtgctgggattacaggcgtgagccaccatacccaacctccctgtgcattttaaagtttttctgctcccttgcaaagtacttttggtggctgaggcttctttcttctacacagccccaccctaccttaaaaccgcccaagatttaagaacacaattctgagtcccttcagaagaggtggcttcggccaggcgcggtggctcacgcctgtaatctcagcactttgggaggccgagacgggcggatcatgaggtcaggggatcgagaccatcctggctaaaacagtgaaaccccatctctactaaaatacaaaaaaattagctgggtgtcgtggtggacgcctgtagtcccagctactcgggaggctgaggcaggagaatggcgtgaacctgggaggcagagcttgcagtgagccaggatcgtgccactgcactccagcctgggcgactgagtgagactccatctcaagaaaaaaagaaaaaaaaaaaaaaaggcagaggtggcttctccgaggtggctgtttgtgtaacttgagtccaagggggcctattcattattgacatccaggagtttggactggttccaagcagcatgaagtatcatagttacaaagaaaagggacaagttaatagttaaaacaaaccagcgtctgagttatagtttcagaatttagggaaatgtatttatttttcacttgtaagggttgctgtctgcaggaagaaaattaggagactcctgagttttactgtcttactgagacagaccagagcagttatttcctaaactgtcttctgtgagatgttaattatgatttctttgttgatatgtcttccccgctcgttaggttaatgatgatttctttgttgatatgtcttcctcgctcgttaggcctcattccctctcagcaaccttgctttattcatatttataatcctagtgctttatgagatagcacttagtaaatgttggataaatactgaaataagcaaaaagatttgcgaggaatacaatgttttatggtcagataagtatgagaaacactggcctaaataagtttctttcctgtgtgacttctcagagcctttaatagcctattgtatgtagaaagatacataatatttcctaatcctaattgatcctagcattcttaatttttgcagaacatctcatgagaatagagttctctttttttgttgttcacaagagacagggtcttgttctgtcacctaggctggaatgcaatggcgcagccatacctcactgcagcctcaaactcctgggttcaagcgatcctcctgccttggcctcccaaagtactaagattacaggcatgatcaccacgcctagcctgagactaaggttctatagatattgtttggcaaatgttgatatacagctccttaggatatgatttttctcagctgattagatgtttgctattcattttaacattcagttgttttcttcttttatctttaccagatgggaacagatagccaaaaccagattcttttggaacatgctgcactgagagaaacagttaatgctttgatcagtgaccaaaagctacaagagatattcagccgaggtaagaacggatagtcttctgtccctgaactctgattcaggtgaatgatcactgttgagtgatagtatggaatcccatgcaaccttaaacatttgtacttatctcctttttgtgggcagagtcagatgccacatgaaagataataattattatttattaaaaaataaaaataaagagtatcttcagttagctggatctctaaaatagagatctcattctctctccatcactcactcgtcttatggaggtgtctgtaacagaggtgagactgtgttattctgtctaaggtccatccatccccttaaagatgctcttagaacaaaaacaggatctcattcagaccaatgtttctggttcattctgcatttcataatatacagttttattgtgagttgagttttagttttttttatttcttaaatattgccatgtactagacagtgttaaggcattggggatatagcaattaattagaaaatctttgcttttttaacttaaaatctgcaagtttcttaagaactaaaaacttaacaccaacaaataacaccttggagtgcaaggtataaagtaatgtgttcacagactcattcacattaaaagcttgttgtttttaataatgaaaaaaattattagctttcaagttcagatacaagttttgcccaagattctacacaaaaggtaaactattggcttcatttatgtcgtacattcactccccttcctttcttgatctcatgataatcattattttcagggaaatagtttccttgtttctcttttgtcaaaataaacctaaacaggtaaaggtagaaaaactgacctattggggaaggaaggtgtcaggataaaatgatgttaaataatcaaggaaagatacggcagaagaaagaatatgaggaaaattggtagcagaaaagaaaattgagtggacaggagaggtagggagatacatatatatatagattatatatatcatgatatatatatatagatatatatagatataatgtatagaaaagttacggaagcttaattttagctctgatagagaataatctaaaattggtaatgatttagctatatagtctcaaatgtacaaggatatgtgggagagagaaactgtccttagaggatagcttaaattgcagggtaacattacctgctgataaagtaatatatttgaaactctgcgttcctaggaagacaggtgctatatttatatttgttcagcctattattagtgcagaaggctggaaacttcataaattgaactcttcacccactgttattgaaagtcagataccagaatgtaaatggtcatatataaacataacataacataacagcactttcaacttagtggcctcccacttttttcatgtacatgtagttagatacatgtcaggtatctacctacattttcatactactgtagttttttatttggaagtttcctttcccttcctataatacttgcagaactggaagattgaggcaagggggagttggagggctgggaaattctaaggaatttccaaataaatgaagaatttacaaagaccactggaagaaaccattcaggttttgtttttaaattgctcagtatggtaaatctggaattgctcatttgttcagttctataaaagaggaccaaaagtgccaaatatttacattatctaattttcctttggcttttaggaacaattatgaaatatagcttagccaaaaatactcaatactgactgatctcccttttaggtccctacagtgttcaaggtcacagggtcaaaatatatcagccagagggggaagaagggtggctctatggtgttgtgagccatcaggactccatcactcgtcttatggaggtgtctgtaactgaggtgagactctgtgttattctgtctaaggtccatccatccccttaaagaggatggtttagataggcgagcacttcattatgtgtaagatgacttgggtttcatccctggctctattacttaatagttgtataacccctagaaaggctattgaattttcttaacttcactgttctcatctataaactagaagtaaatatgtaaacccccactgaccttacaacactgttttgggtcctgagataaagtatctgaaagtgctttgaaatctgtaaaacaatatataaatgtatgacagtagtagtattatattcataaaggttagtagttggagtgcagtggtgcgatcacagctcactgcaacatttgcctctcgggctcaagcagttctcccacctcaccctctggagtagctggcactacaggcgtgtgccaccacacctagctaatttttctattttttgtagagaaggagtcttgctatgttgcctggctggtctcaaactcctgagctcaagtgatccgcccacctcagcctcccaaagtgttgggattacaggcatgaaccactgcacccggccagaatattattatattatatttatttatatgatatatatgagttatatgatatataatttatatgatatatataatttatatgctctataattatataagtcacactttagtaacaaataagatcatatagtacatatagttatataatttaccttttttacttaattgtatatagtgagcatttttgtatgtaaatgtaaagatctgtctcatcctttaaaatagatgcgttcttttccactacatggatatatcatgactaatctaaaattgatagacatttaaatcattgccaatattttcactaatatgtcacagtgaacatccttgaacattttttacattatttattggaataaatttatatgtataattgctaggtcaaagaatatgcacaataaatttgaaattttctatcaaattgccccccactgagtttttattctttaatagtagaatgattcttttttaaacagagtctcactgtgttgcccaggctggtctcgaactcctggtcctcctgcctcagcctcccaaagtgctggggttacaggcatgatccaccatgcccagcctggagtgatttttttttttttttctttttgagacagagatttgcttttgttgcccaagctggagtgcaatggcacgatctcggctcactgcaacctccgcctcccaggttcaagcaattctcctgcctcagcctcctgattcgctgagattacagacacgccaccacacccagctaattttttgtatttttagtagaaacagggtttcaccatgttggccaggctggtcttgaactgctgacctcaggtgatccacccaccttggcctcccaaaatgctgagattacagatgtgaaccaccgcacccagccctagagtgattcttttaatgattattggttctgaaggttttttgtttcatactatacagaataggacagttttagagatacaggattcagaattaacatcgctaaaagacacagttggacatgaattcacttctttcattcattcacttaaatatttgaatgcttaccatattctagacctgttgtagcagtaaatgagacagtagagatctctgctctcatggagctttcattctagtaggtgagttgaatcaataaagagataattacattgattaggaaattatataattatgtctttatggacaaggcattaaatatctttttcccctcctactgtagagtggtgaaatcaagtcggtagatcccagactaatccatgtgatgctgatggataattcaacgcctcaaagcgaggtacagtaatggactgcattcctgagcagactcatgagcttgcattatcttgctgtgtgtagatcccttatatatgtgttttccatggatgccttttgagttgttcagctttagccactgtacatttttttgctctctccacagtctgtctaattaaggggggatattctcaagaaagagacctagtttgagcaaacccttttaagcatgactatgttccctagttcttctaaagtgcaaggctggtttcttcctatattctgtcaggacaggtatatttgaaagatatagtagtcagttaaaagtgcaataagcagtagtaatactcgtgatctaccaagtaacaagaagtgaaggataaactacgtccacttttttttttttccattcggtggcagtgagctccaacggagtctgaaattctgtattcccaagtagaatcaattcaagctggtacctagttcagtgctcagcccccagtgcattggttactccataattgttatgaaccagcccaactcttggtttattcagaattaatatagccccaaaaaagatacattaaagctctctgggccaggtgcagtggctcacgcctgtaatcccagcactttgggaggccgaggcaggcggatcacctgaggtcaggaattcaagaccagcctgaccaacgtggtgaaacgctgtctctacaaaaatacaaaaaaaaaaatagccaggcctgatggtgggtgcctgtaatcccagctactcgggaggccgaggtgggagaatcgctagaacctgggacgtggaggttgcaatgagctgagatcgcaccattgcactccagcctgggtgatagagcaagactccgtctcaaaaaaaaaagtaaataaataaaaatctctgcctgaaccaatcgagtaattctgtgtgaatttccttcagttgaccagctgtccacatattcctcacagtatcttggcacctctgtaatattgctgtcgttgccactcctgctaagtatatagtctttcctcatctttatccagtcattcttgacttcctaaaacaagatcagaataggaaaagaaaaaaaattttttttttttgaggcagggtctcgctatcttgcccagtctggtctcaaactctcacctaagcctcccaaagtgctgggatgacaggcatgagccactgcacctggccagggttaaatttaagaactgtttactacatgtaatattaccacaaacagggtaagtctcttgactgtgtttgcatgccaaaaacacctgctactttgatcgtgtattggtccccttttttgttcctttccttatttcattccttcattaagcatatattgtatgccaggtactgttcagctggccaaatagaactggggagtactggtctcaatgttgtaggctgcttactcacgtatgagtagctcactgtaagtaggacttacatataagttgtttagggactggtagtatgttgctgtgagccaggctctgcaagttggctggatgacttataggtgggatgtttgtttttgtttttttctttttttttttgagatggagtcttgctctgtcacccatgctggagtgcagtggggtgatcttggctcactgcaacctccgcctcccgggttcaagtgattcttctgtctcagcctcctgagtagctgggactacaggcgcacaccaccatgcccagctaatttttgtatttttagtagagacagggtttcaccatattgaccaggctggtgtcaaactcctgacctcgtgatccgcccaccttggcctcccaaagttctgggtttacaggcgcgaacgaaccaccacgcctggtgatctttggtttttagcagcagatgttggttcttccttttttggtattaacatgatattactgttttctttgctagcagagtccaattattttttatagttctgccaagttttatagtaaccctttttagagatccatgatcacctcatctcctttaagtatgggtgaatgaacaagaaagaacagagttcactgattgtgatctgcaacagtgaaaactgggtggtgatagagattgagaaagaatttaaaagcttttaaaaatcaaaagaggccgaggcaggtggatcacctgaggtcagagtttgagaacagcctggccaacatgatgaaaccctgtctctactaaaaaacacaaaaattagctgggcgtagtggcgggcacctgtaatcccagctacttgggaggctgaggcaagaaaatcgcttgaacacaggaggcggaggttgcagtgagctgagattgtgctattgcactccagcctgggtggcaagagcaaaactccgtctcaaaaaaaaagaagaaaaaaatcaaggccaggcgcggtggctcacgcctgtaatcccaacactttgggaggccgaggcggctggatcacgaggtcaggagatcgagaccatggtgaagccccatctctactaaaaatacaaaaaaaattagccgggcgcggtggcgggcacctgtagtcccagctactctggaggctgaggtaggagaatggcgtgaacctgggaggtggagcttgcagtgagccgagatcgtgccactgcactccagcctgggtgacagagcaagactccgacttaaaaaaaaaaaaaaaagtcaaaagaaaacaacacttagcaaacagataaagttcttgaatgaaaggtttagaggctgggcgtggtggctcatacctgtaatcccagcactttgggaggccgaggtgggcagatcacctgaggtccggagttcgagaccagcctggccaacatggcgaaacctcatctctactaaaaaaatacaaaaattaggccaggtgcagtggctcacacttgtaattccagcactttgggaggctgaggtgggtagattacctgaggtcaggagttcaagaccaacctggccagcatggtgaaaccctgtctctactaaaaatacaaaaaattagctgggcatggtggcaggcgcctgtagtcccagctacttgggaggctgaggcaggagattcgcttgagcctaggaggcggaggttgtcatgagctgaaatcacaccatcgcactccagcctgcacgacaagagcgaaactcttgtctcaaaaaaaaaaaaaaaaaaaaaaaattagccggatgtggtggcacacacctgtagtcccagctcctggggaggctgaggcaagacagtcacttgaacccgttaggtggaggttgcagtgagccaagattgtgccactgcactccagcctgggcaacagagcaagactccatctcaggaaaaaaaaaaaaaaggaaagaaaggtttagaaacttagataatattaccaaaagtataggcaaacaaaagttaatcttgagctttgcataacagttttttgttttgttttgttttgttttttgataaggagtttccctcttgtcgcccaggctggagtgcagtggcgcaatctcggctcactgcaaccttcccctcccgggttcaagtgattctcctgcatcagcctccccaatagctgggattacagaaatgcaccaccatgcctggctgattttgtatttttagtagagacagggtttcaccatgttgcccaggctggtctcaaactcctgacctcaggtagatccacccacctcagcctcccaaagtgttgggattacaggcatgagccaacacgccaggcctcctgggttcaagcgattcccttgcctcagcctcccaagttgctgggactacaggcatacgccaccacacccagctaattttttatattttagtagagatggggtttcaccatgttggccaggatggtctcaatctcctgaccttgtgatctgcccgccttggcctcccaaactgctgggattacaggcgtgagccactgtgcccagcccaggttcacttttcctttggtcacagactcacaaacgttggtttagtgacttctggttagagaagatgtcctatttcagtacttaaaatgcaagtttctttcaagcaaggaggtaaatatgtaataaagtgagttatttcatcaaggggtaaatgagctcccaccctagctttagcactctattttgtaaaagaaactcaacaaattgttaaaaccctcaaagaagtccatttaaggcagtgtaatgttttatttaagagaaagtttgccaagtgagttaacctctagtaactattatcttgaatgtgtgtgtataaattgagtcacacaaagattagagcttttaacaaaggggatgttttagaactggcattggaacttggcagtctatgcctgctttgtctgcttctagagatgggaaagagctaatggtgtgtggtattcacaggatgaaagtttccttgtaatcttttttgaattttgttttgtaggggggtacgttaaaagcagtaaaatcttccaaaggaaagaagaagagagaaagcatagaggggaaagatggccggaggaggaaaagtgcttcggactctgggtgtgaccctgcatcaaagaaattaaaa

SEQ ID NO: 931 - DNA, 274 bp, Homo sapiens
gctcacacctgtaatcccagcactttgggaggccaaggcgggcggatcacaaggtcaggagatcaagaccatcctggctaacacggtgaaaccccatctctactaaaaatacaaaaaattagccgggcgtggcggcgtgcacctgtagtcccagctactcgggaggctgaggcaggaggatggcgtgaacctgggaggtggagcttgcagtgagccgagattgtgccactgcactccagcctgggcgacagagcaagactatgtctcaaaaaaa

SEQ ID NO: 932 - DNA, 31813 bp, Homo sapiens
gttttagcatctggtatcctcaccctttctttaatacagacagtccccaacttatgatggttcaactttacagtgatgtaaaagccatacacggctgggcgcatggctcacgcctgtaatctcagcactttgggaggccgaggtgggaggatcacgaggtcaggagattgagaccatcctggctaacacagtgaaaccctgtctctactaaaaatacaaaaaattagctgggcgtggtggtgggcgcctgtagtcccagctacttgggaggctgaggcaggagaatggcatgaacccgggaggcggagcttgcagtgagccgagtgcatgccactgcattccagcctgggcgacagagcgagactccgtctcaaaaaaaaaaaaaaaaaaaaaagcgatacacattcaacagaagccccatcctttagtactcatacaaccattcttttttttttttttttgagatggcgtctcactcttgcccaggctgcagtgcagtggtgtgatctcggctcacagcaacctctgcctcccgggttaaagtgattctcctgcctcagcctcctgagtagctgggattataggcgactgccaccaggcctggctaatttttgaatttttagtagagataggatttcacaatgttggccaggctggtttctaactcctgaccaggtgacctgcccacctcggcctcccaaagtgctggaattacaggcatgagccaccgtgccccggttctcatacgaccattctgttttttcactttcagtacagtattcaattacatgagatattcaaaattgtaacataagctctgtgttagatgatgttgcccgtaggctcatggaaatgttctggcacatttgcagtaggctatgctaagtaagttatggtgttcggcaggttacatatattacatgcgtttttgacttgtgacgttttcaacatatgatgggtttgtccttataagttgaggaacatttgtagccatttcatcgtctgtgaagaggcctgagtggattttgtgctggagaccggtgtgactcagctccagtgttgactgaccttctaaccatgggcttgtgactgaatgtcctgagccttcattttcttccctgtgaggattaaaatgaacctcaggaaatgctggcttgtcctctttctgtcaagctgggttctgagggggtgagcccaggtaggagtgacttctgaaccagcccagatttacaggcttgggcatagggagcccagcctcagcctgggagcctcatcttccattaaatagctcctggcattcaggggagtgcgttgcagcaccccatttttttttcattgaagtcctgtcttccagccaggcacagtgaatcacttgaggccacgagtttgagaccagcctagccatcatggggaaaccccatctatactaaaaatacaaaaattatctgggcacggtggcgcacacctgtagtcccagcacaccagagttcaagaccagcctgggcaacatggcgaaaccccgtctctacaaaaaatacaaaaattatccaggcgtggtggtacatgcctgtagttcctactccttggggggctgaggtaggagaatcactcaagccgaggaggttgaggctgcagtgagccatatttgtaccactgtactccagcctgggtgacagagtaaggccctgtctgtaaaaaaaaaaaaaaaaaaaaaaaaaagtgctttcttcttcttcttctttttttttttttttttttttttttttttttgagacggagtctcgctttgttgcccaggctggagtgcagtggcgtgatctcggctcactgcaagctccgcctcccaggttcgcgccgttctcctgcctcagcctcccgagtagctgggactacaggcgcccgccaccactcctggctaattttttgtatttttggtagagacagggtttcacggtgttagccaggatggtctcgatctcctgaccttgtgatccgcccgtctcagcctcccaaagtgctgggattacagtcatgagccacgatgcccgacctctttcttatataatttttttttttaatcgggcagccctcagaatcacagcagattcagaaagactccccagaaaagttctttcactcctaacttctacccagcctcatggtcacctcagcagctctcctgagaccgttactaagttctccacagctaatggtaactcagcttggaaagagttctcttgtaggaggatgctgaagggaggttgccaagtggtgtgggaaactgcttcatgcttaagttcacttccatatcatgatactaaaaggtatctaacagctgattttcattgctttcatttgtgatctgctaggaccacttgatccttatcactgcttttggcacactcctcatccaagagttgatcgcagaggcagagttccttgccaccagtccagtggaagtacaagccaactttgctctccaaatggcagcagtagctgagcaggccgccctgcattctctcctcataaacatgctgttctcaagtttgtcagaatccagagctctctactcattacccccttttccaaacaagcaagcaaagcatgctcttcctttgtttcccttaattgcctaaaacatctccatgctcatagctgttgactctctttgcctcctagttcctgttcctctggtgtaggatttctcagccctagcactgtaaacatgttgggctggataatcatctcttgtatgggctgtttgtgcattgtaggatgttgagcagcatccctggcttctacacactaagtgccagtgacactcttctcccctccccagctgtaaaacccaaatgtctgcggacattgccaaatgtctcctagggggcaaaatcacccctggttgagagtcactgctctatcatttattcactaaatactgctggtcagctgggtccactggcgaacctcacatcaataaacctggtaatagaagcatattgttcttacattagaagtttactctcttcagttatctcactgggcccttgagggctttggggaggagtgatgggaaatggtttacaattaacagcatattccaatgaagaaagaaagcatatgatgtctgcacaacagaggagagtgtccacaatgtacagctcttccctggagcagttatgtttctcagggtgtgcttttccaagtcattttgtgtctggttagaagccaccttcccttagcatccagaggtgccatgtagactagggttggtcacagtgtgtagattgccattgacctgcccattcctagtgtttgacctggtggtcatggcactctgaccacatcagttttcctctccaagcccagatgggttctcagaaccctccaccccaagctgcactcatgagaggcggcacttctgccatcctgatctagagcttgttcatgtggtccagaccatttctttgcagccccctctcctgtgtaaaagcctttaggaaagtgcagagatcctgatggattccccttgaccctcagcacgcacatcctggtatgtagtgctcagcactccgttgggggcttcagactggagaagagaaaactgcccttccctttcaaggacatcctccaagggccagaatgctcagttccgtaaaattaactctccactgcctacttttttttttttttttttaagacagtctcactctgtgccccaggctggagcgcagtggtgtgatcttggctcactgcaacctccgcctcccgggttcaagcaattctcctacctcagccttccaagtagctgggattacaggcatgcgccacctcacccagctaatttttgtatttttagtagagacgggatttcactatcttggccaggctggtctcaaactcctgacctctagtgatccacttgcctcggcctcccaaagtgctagtattacagtcatgagccaccatgcctggcctgctgcctatttaaatagcaagcagttacagttaaagaaagaccctggcctggggacgctgccaaggctcctaatctgacacttctttcatgtggaccagggatctgaactgtgtttcttccaaacttttggagcttgcttccttggtggtaagctaaatagtggcccccaaaatatacccctttataacccctgtaacctgtgaatattatatgacataatggactttgcacatgtaattaaattaaggatcttgagatgaggggattatcctagattatctgggtggacccctaaatgcaatcccaagtgtccttatgagtgggggccagagagagagattggacacaggagaaggaggcaatgtgactactgcagcaagatgctacactgctggctttggaggtggaagagaaggccaaaaatgcaacgaacgtagctttggaagctggaaaaggcaaggaaactgttttcccttagaacctctggaggaagtgtggccctgccaacacactgattttagcccagtgaaactaattttgaatttctgacctctagaactgtaagagaataaatgtgttttgttttaagtcgctaagtttgtggtaatgtggtaatttgttacagtgcagtaggaaactaatacagggctcatctgcctccaggtacaagtggtggcttggctgatccctgttcttattttaaggcgtccctctcatggcacaaggagagcataggcccagcattttcctgaaccagtatttgaaacaatctgcactttgggggaacctgttggggagttcttggaagcaagagagaaagcctcatatggtacccgatccttgctttggaactctcccagcaccttcagtgatatcatgaacaaagagttctttcagaccagtgaggatgtaggattattaaaatctgattctaattccatcttcccctctcctcttccatttattcaataaatgtttattgtgtacctcctatgtgctaggcactggggatgaagggataaacaaagcagataaaaaatctcctgctctcgtggtaactgaggtgggggaagtggagggagccagagttaagtcaacagcatgtgagatggcttcagatgctctctagaaaactaagcagaaaggagggtagtggcagttccacatagagggccggggaaggtctcaccacgaaggtgacatttaagtggaaagaggagagtgaactattgtgggaagaatctcgcaggcagagggaaagcaagttccaaggccctgcactgggacacagctgaggtgttcaacgcatagcgaggaggccagcgtggctggacagagggagggaggagaccaggagatgaagttagagacgagattggtggccctgaagtgccataacagcttttactttgcttggcattttgccccttctttctcctctcctccccctcacaccacctcacgagttttaggcccatgttcctcagttcctttccatgggatatttatcccatcatacttagggactaccagcaggcaaacatagtcacttaaaaatattagaagagggggaaaaagcagcctcctctttctgaatgatgaaagcagttccatggcagtgttggcatggcactgtgtatctagcagtgcaggctggccattcaccgcgtagttctgggtggtttctgagaggttcccctccatggccttcttcagcccatgaggaagtccaacccccctggcccgctgtttctttccatttcacccctcttggtctccccagtgggactcccacagctgacttctatccccacctgtgtctaatcccctttccatggctgagccggtagataacctagtaacgatctgagtagaatatggctcccacatgttgaatgcattgtgctgatcactacatatatcactttgattcacacaacaaccctgagaggtaggaaccattgtaccccttttagagatgaggatactgaggctcagactggttaggaaaattgcctaaagttgcacagctaatgaatggcagagctgggatttgaacccaagtgattaaagcccatgtctttgatcactacatagcagggccttctaggaaggatggctggctggatctagttgttccagtttggaaagtacctgcttgactggccagactgctgttggcttcagaaaatagcagtctcttgttggtcactgagaagaggcaaaattttggcaggccttggggcctcctgcagagtctcattccaggtcagtggacagaggaggccctgagaatagtcgtgcatactggctccctggatctgctccaagacagtgagcagcccctagaaccacaagagactggccagccaagctgtgggcccggcctgtagggtggaaggaactcttaagagaaaaaaaaaatctctgctgtgattaatcaacagcttcagtctggtgaagtgaaaagagaaaagttggcccagatgtgcacatagggagagaaataagggagggaaattgcctttattcatgttctcccttaggccagtcgttaccccacggatgagatcaccttccttttacaccagcctgcaagaggtgtgtagtggtagtctcattttacagacaaggtgtaggatcagagaggttaactcgcccaagtcaaacagctaacaagtggtggaattggaatttgagccctgttcttctcagttcagtagccctgctgttcttgctgatgtcacctcagcatgggctctccaggtatgtgcaaatagttatgcaagtgttgcatccacaggcttgtgagcagaggctgaaagggagccagggctcttggtacttgccctctcaacatgggccctgcctaagctagcaggactcactatacccaaaccagcagtggcattatatttttctcttttcttgcaccttgccatccccgatttatttttagagagccttttctatttctgttcccatttcttggcttggatgcaggggctggggtgcagggatggcgctagaaatcagaagaggcaggcatagatggcatctcactggtggccttggctggtctctgggaactgtgcccatctgcctgccctgctggctcctcctcaggccagctgtaggccccagggatcatagagctcgggtagctagaggctgggagggcaggcgagacagagaaacagccacacttctcatttctttggcttctcagagggggatgagcttcctcctggaacagagaagggagtagctcactgcctgtttctcagggttaggttacggacttctagggaatatggggtagtgcttaagagccagactctgtgtggcatgggggtgataactgtagaccctccacctctggggattaaatgagctcatacatgtaaaggcacagaggaggcactcactgaatgatgattgtttcattagtgtctttagaccctcagcacccagcaccataggtggatgccagtcattattggttagaccaaacagaacttcaaggcagctgggcatggtggctcacacctgtaataccagcactttgggaggccaaggtgggagggtcacctgaggtcaggcatttgagatcaacctgggcaacgtagtgagacccagtgtctatttatttaaaaaaataaaataataataaaaaaagaaaaataactttaatgttatttttgtcgtcctcttcatctgaacattggcctgcgtaggtattaacctgagtccagtgattgtttgtggagccccacagggtacttcccagtgacagcagcctggagtgtgctcctgccagcccctgcctgggccctggaaaaggcagggcagtgcagcgaggaatcttctggcctaaggatgcctgtaaccaccaaaccttatgtttagttttacaccttgctgagggtctggcttttggatatgagctctggagtggtaggggtctgtgtcccatggggacaggtggttctgggtgttgggcacgaggtgatggaggaagggcctgccacttgcaagctgtttatctgactagtaataaacagtggatgacacctttaggaaactgtatttgggagctttgaaattaatcagatgccaccaatggcatttttaatttagttaaaaatgttttagttatataaataatgctcattcgttatagatgattagaaaatacagataagcactgaggagaaaaaagtaatatattatcacacataagtggctgctttgatatatgatttttttttcttacctaggttcttttcaaattgtgtatacctagttattttttctgtctttcgaaatgggatgctgtttaacatttagttttgtgacttgcctttcccatttttcaggtggttttgtggtgtctgcttgtcctccgacctcctctcccatttgtgggaaaggcatttggcctggagggaggcacttgggaagaactgtctggttgttccttgatgttattgccagacttgcagagggtagagaggtgcatgaagtcttactctgcctctccccatctgtgtctctccctgtccctgtccagcgccccatctgctctgcctactcaccactcctgccttttttttttttccttccatacaaatccagaaaaggataccacctccagtctgaaggtttctttctatggcttttagggatgaatctctcaggagtttagaaaaaaagatgcacagacagtatataggaagggtaatgccagggctgggggtgggggtcttgggaagagcaactgagaggagggcctgggtccctggtgctgtcttgagtcagtgagaagaagctgcgtgggtgatgggttggggcggggtaggcagcaggtgactgcagggacctctctgaaacagcaagcaagctggccaggaagacgcctggagaataaggggcccagataggggccagacataggggagaagaaaatgtgtctcagtggcacctgctcctccaccctggccccactctttccatgatctttccagagattctctctttttctgcctgatctgcttccctcacctggcagtgcccagccccagtagtttgacacatctggtatatctggctactgtgctctactgacacctgtgtggcagcagctgcacagcttcttggcatctccctgggcagtaggcagggatccgagcatagaggaagatgttccatgcatcagtaactcagattccgttccagaaacgcatctcaaagcaagggagaaaattgaagatggggtattttgtggggaacaagctatgccttcctgtcacttcttacagaataaaatggggtctctggcagtaggcaaggagaaggcctttctgagcactgagggtcagtggcttctcaggtcttttctgggccactttggcctgcacacaggttgggctaggaattcatgcttaaaagcaggctgatttccataggctgtgcgttcctgtgggcctgcctggatcatatctgttctgctgtgatcccaggcctggtgagacccactggcttcctgtacgtcccctcaaagcctgcgccaccgcctctcccttcaccactcccaagctataattaagttcccatgtgaaactgtatccctcagctgacacacgcttgtaactacagccctggccattggacggctcatctggggtgacttctggggctggtgcctcagcctccagacgctctccagtaggtctgagtaggtggtgtggacccaccaggaaagggtggatccagtgaggcgggggccaggccttgcccaagagtcagaaagtgggaagtcacgggggagatgaagggcgagtgagcagctagaaagtgccaggggacacaaaaatgggggagacaggcagccttttggggctggagggcatggacagggtgactgatgcctgagccacaggcagaatgtgagcagtttattttattttatattctacatatttttatagcataaaattaagatatagttcacataaccaaattcaccactttaaagtgtgtactttgatggtttttgtatattaactgtgttttatatattatattaaattaatatatttatatattatattaacggttttatatattattttagctgtgttgtttatatattatattaactgtgttctattaaccactaattccaggacacttctatcacctaaaaaaccctttacctgtcagcagttactccatcccttggctgctaatctacttcccttctctatggctttccctatcctggacatttcatatgaatggaattatataatatgtagccttttgtgtctgaacaatttcacttagcatgttttcgaggttcatccatgttgtagcatataatagtactgtattcctttttgtggctgagtattccattgtgtgtatatattccattttatttattggtaaattggtggacatttgggttgtttccattttttgactgctgtgaacattcatgtacaagcttttgtgtggacatatgctttaggttctcttgggaatatacttagtgaaattgctgggtcatatagtattccatgtttaacttttttttttttttttttttgagacggcatcttgctctgttgcccaggctggagtgcagtggcacgatcttggctcactgcaacctgaacctccctggttcaagcaatttccctgcctcagccacctgagtagctgggattacaggtgcatgccaccacgcctggctaattttttttttgtatttttagtagagacgaggtttcaccgtgttggccagactggtctcaaactcctgacctcaggcaatctccccgccttggcctcccaagtgttactctttgttttttgtttgtttttttttttgagacggggtctcactctgtctggagtgcagtggcgcgatttcgcctcactgcaacctccacctcctgggttcaagtgattcttctgcctcagcctcccgagtagctgggactacaggcgcatgccaccatgcccagctaattttttgtatttttagtagagacggggtttcactgtgttagccaggatggtctcgatctcctgaccttgtgatccacccgcctcggcctcccaaagtggtgggattacaggcgtgagccaccgcgcccggccccaagtgttactcgttaggcagatacctgatacctgtctgctatactcactggtctgcaccttgcttcacttattatatcttggccatctttgcataccagacatgtagagcttccttattcttttttttttttttttttttgagatggagtctcgctctgtcacccaggctggagtgcagtggcgcgatctcagctcactgcaagctccacctcctggttcacaccattctcctgcctcagcctcccgagtagctgggaatacaggtgcttgccaccacacccagctaatttttgtgtgtgtgtgtatttttagtagagacagggtttcaccgtgttagccaggaaggtctcgatctcctgacctcatgatccgcccgcctcggcctcccaaagtcctgggattacaggtgtgagccaccacgcccagcccctcattcttttttttttaacagttggctcatccattgtatggatgtgccagtctcttcttttttttttttagacagatttttgctctgtcacccaggctggagtgcagtggcatgatctcggcttactgcaacctctgcctcctgggtcaagcgattctcccgcctcagcctcctgagtagctgggattacaggcatgtgccatcatgcccagctgatttttgtatttttagtagagacagggtttcactttgttggccaggctggtcctgaactcctgatctcaaatgatttgctcatctcggcctcccaaagtgctaggattacaggcgtgagtcaccatgcacggcctggatgtgccattctcttattcattgatgaatgtgcaggtgacttctagtcttttttggcaatgaataaccttgtcattttacacacagataaacagattgacaatgcttctgtgtgataggtgcagtaatggagatagacactggggaactagggaaggcttccagaggatagttaagaaaggctcagggtgagtgagcgctggtatctgagtgggccttgcaggcctggcagaatttcagcaggctgagatgttgtaggaagggcaaatatgactgaagaaaagaacaacagctcaggtgtgacaggggaaatgaagagtattagttatctattcctgcataacaaattaccccaaaacttagtagcttaaaacactatctcgcagtttctatgggttaggagagatttacacaaatatgtgaataccagaaggtgaggattgttgccagccattttagaaggctgactctaatagcaagttgcagtaaggataggattggccaaggcaacagatggagccatgattgtggacaatcttacatacttagctgagaggttgtcagagattgatctgagaacagtgtgagccatggaaggtctttgagcaggagaataatgtgatagttgctatacaggacaattaatctgatagcatttatgctagaggggtcaaaatggagagagatacacaggcagaggcctagattaggagatggctatagtagtacaggtgagaaattcctggcctgtagtactaaatacttttttttttttttaagacaatctcactctgtcacccaggctggagtgcagtggcatgatctcggctcactgcaacctctgcctcccgggttcaagcaattctagtgcctcagcctccttagtggctgtgactacaggcgtgtaccaccatgcctggctaatttttctatttttagtagaaatggggtttcacggtgttggccaggctggtcttgaactcctggcctcaagtaatccacccactttggcctcccaaagtgctgggattatgggcgtgagccgctgcatccggcctctgtattaaatactttagctgcatattctttcttcgaaatgaccacaaaaagaaggtattactgattaatatgcatatggtcttgcgtatggccagacttatgacttgcgtatggtcataaaggtagtaagttgcagagcagcactcagacctgcctggctttgatgaccgtgccttgatggcactggaagtggaaaggtgggggtgactggggaggtgaggttttgtccgttccctggatgctaaaaggaaatggaggagtgtaagaggttgattctttgaacctggatggctggggcaaagataacactgtaacaggaagaagagaggccggagggaacactgatgtgatgggagaaggtgagtgatttgggaacatggggcatttgttggcagggtccttcccaattatagggcgagtataaatagttcctgtgctttgtgtatgaagaggtacccttggcccaaaaagactctaaatgtggaaaaaggatatggtggtgtggtggtggtttgaacattgggtttgcgcagatagtgatggtaactggcactggcctgcgcttcagactttcacagcccgttcacttctgttgaaactcacacaaccctattcaggttatcatcattccctatctgattgatgaggaaactaaggctcagaaaaatccatttgctcaaggagaaacagtgtttcagttacctactgctgtgtaacaaatcacctgtgaaactcagtagtttaaaacaaccaccatttatcctttctcttgattgtgtgaattgggtccagatgcttggttctgccccacatgatgtcggccaagcttgcccatttgtctgtgtttagctgcactgtaatgtccaaggcagcttctctttgcatggcctctaatccttcaagagtctatcctgaacttcttgcagcatggcatctgggggccaagacagtggaagccagtcgtgttgaggcctgggctcacgtcccagaacatcacctcaatcatgttctattggtcagagctgtcactgggccagcccagattccaggttgggaactagacgccacctcttgatggaaagagtggcaaaaggtttgtagccatatttaatccacagacagccggtagtggatacctggatttgaacccagatctgtgtgactcagactcacagtctgtcatgccatactgcatccctttctgcttctggttccttgggagttgcaaagcttgctggctcttttgtgtggttggagagggctgatttttcttgtggtctcccacagtggaagttgtactagtcatcccccttttcacagatgagcatccaagatcactgtgtcttagggaaccttccaaaataggtttgctctagggatttgctagcttcccccaagcttcagcagtgatagccagacatgcatggaatttccctgtggagtttccctttctgcgcttagtggccttttgatgcacagtgctcactgggtgggattcctgctgcattgtagccagatgtggaggctagccctattttgagttatcccagatggtatccagcccagtgagtcccatacttgactcaactggcatattcaccagggagttttggggaaaatgtagattcctgggccttcctcatgcctattgaattagaattcccagggatggcgtccaggaacctgcctttaaagctccccattgatttgggagtacagcctggttgggaaaccaatgacttccagaggctggcaccctccctcagcccagtcatttcagaaagatgcctttgaagtcactgatcagaggaggccacatgggagagaatgatttgtccagagggcctcacacttcacaaccaggaagtgactcctgaaagtgtccaggaagtttctatttgaatctgctcaaatctttgatgttgttttgcatgctttgatagtatctgagctttatggtggcctctgggtgtttttctttgaaagtgtttgcagagagtagcaagctcttccagcagtcagcagacactccctaaccaggagctacttggtctgatttatttgaaatatgaaattcctttgcttggctgtctggttggtatctttggtgtgaagaatatgacaaccctagagatacctaggttagcacagcagttggacctttctagtcttgtgccttggacatacttaaggtacacttggaaaagtagattttaaaaccctggataatttggtttgccagttaaataaacttctatattttagaatatttggaaaataaagataaatataaggaagaccataaaattacctagaactttcctctcagagaatttccacggttaatgttttgaatggctattcatccttcccctcatgacccttcacaccccctctttttgaaaaccatattgaagtcatattgaatgttactttttagcagttttgttgagatgtaagtcataaagtccacctgttgacagtgtgcaatttgatggtttttagtatttacagagttgtacaaccatcaccacaatctagttttagaacattttcttagtcccaaaaagacatcttataatccattagcgtgcattcccgcctcgatgccccatcccgcccttactccagcccaagactaccactcatctgctttctctacgtacagatttacctgttctggacatttcatataaatgggatcatacaatatgtgatcttttgtgattggcttctgtcactggacataatcatggtactgttttgaaacctgctttaaacatttatatcctagcaatttgaatatagttttcaagaatgcacttttaatagcagagcggtattcattcttatgagaatatctaatcttatttaatcagtcctgccaacagacgtttaggttatttctcatcttttgctcttatagccagtgctctctgcactcagaaattattttgttgatttattggttaattgtccgaatctgtgactagaacaaaagctctttgagaacagtcaccttctctgtctcccctactacttggcatagttcctggcacttggtaggtattcagtttttaaaggatgtgtatgtgtgtatatgtgcaaattttgaatgaatcaaaatgtaaggatattaataaatgttgccatattgccaaattctagaaagttgtactaatttaccctctcactgcagtataagggtacctgactccctgttcctttgaatctgggttaatttgtacaggaagtcctgtgatcttttgaatgatgatattctctgacctgtcaaccagttagtttgggaattgatgctgtctgtgtcctgaccctgtctgtgggccaggaagggtctggctgttgggaaagatggtggtgtgtgggagctctagctgcccgggtcctcattgtggctccgtggtattgtatcgtttcctgttgcccttagaaaggctgcatcgtgttgtctggccacttcctctattgtgtgcaggcatgttggggagtgagtagagttgggtggataaagtatgtgtaagaagatactggttatggctgctgattggagtgccttttgaagtcgtcaggagagatgtcactctggaagttcagtgtcttcaaaaatagaaatgaagaaatgcttccaggaagtctgatgcaactggcccagtctgcccccatctgagggtggtgggcacccacatggctggtaaacgcttcatgagtcacccactggccacagtccctgctcctctccacacacttcctgtctggaaaagcctgctacccgcccatggtgaagagtcaccccagagaacttgccagggatgcagggcaggtcttcccaggtcacagcagcagcctctcgctcatgggtttcacagcagttcttctccccaagatgagttgtggtaactgctttttagataaatatgtggaatggatggttgggattggaaaaaaaaagagcggctagatggcaaggcagctcttgtgtgtagcagggagctcacacgagccccatggtggggcagttaaggccccagaattcaccttctccagcagctggctgctcattcttttcttcttctcgtggttttcccatcacatttcccttggggtttcttccaggccttcccctactcaccccacaccctctcagaagatgctgcctcatgtaacttggccaagctctcaagcattacagatgcctttaccttcttttctttgcatcttagaaatcactcacatgttggtctctctcacataattgctttttattattacttcagcggttgccaagtgcctactctatgcctagtaccttgttagactcgggaatgatgcagaagaaagagactggaccctgccccctaggagggtaaatgtctgttctcccatggcctctgtttcccttcctctctgactgcgcctttgctgccctggttcctcttcctctttccgctgcctgagtgtcaacattcttcaggcttctgccctctctcctctccctccacgcgcttgtcccttcctgtggctgtgaccatctgctcttatagctaccaaatactaaagttcttttctcctgaaaaccaggtccctgtgtccacctgcctgctggagtgtgcagccttaaaagcagagtccatctttgtctctgctctttgcatatcccctttctgttaataatccgtcattctctcagtttcccggagccttactgacagctttaaacctcattcctctgccatgcacaggtcgttcctcccgttcttttgagtgtttctccccactgattttcctgcctgtagtgagttggatggttgcccctccaaaagatatgtccaagtcctaacccctagaacctgtgaacatgaccaccttgtttggaaaaaaactcattgcagagattctttcctatgctgcagacgtacatgaacctgtgctcattgacctcctctctgggcctggccttgttggtctctggcttgaaatagtgactgtacttctagtccacacagtgattacatatttattactctgtttgagctcccctagtccaaaggcaaagttcactgcctgccctttccactaactcctaggtcagacttgctaggttgtgtgcacagcagctacaagtgtggtttctaaggtgggtctgggtttgaatcctggttctgtcatttattagccaagggcctttgacagattgtaacctttctgggcttcagtttcctcttctggaaaatggagctaatggattgttgtgagaattagattgcatagtgtctagcactgtgcctgacactctgagctttatttttatttatttttattttttgagacggagtctcgctctgttgcctaggctggagtggagtggcatgatctcggttcactgcaacctccacctcccaggttcaagccattctcctgcttcagcctcccgagtagctgggtttacaggctcccgccaccatgcccggcaagtttttgtattttttagtagagacggggtttcaccatgttggccaggttagtcttgaactcctgacctcaggtgatctgcccaccttggcttcccaaagtgctgggattacaggtgtgagccaccacgtccagcccactctgagctttataaccagagagatgctgtggctagccaaatcgctcaacctatacttggaggatcccaagcttggatgagtgtaagagctgtgacttaaatccagcctacttgtatgtcattctgccacagttgtctttgtctctccacagtttgtcctggagctgggcatggtgagggctaagacaatggattacagagctacaggtctaggagggcatgtggaattatgcctatatgagatagatgacaaagtgggtaagagcatgtgctctggagttagacctgggttcagattcaggctctatgaccctatctcagtgaccttgggaaacttttctttgcatctctgggtctcagttttctcatctgtaaattgggaataacaatggttcatacctgtcttagtctgtgctgctataacaaaattcctgagatgggtaatttataaacaaaagaaactgatttctcacagttctggaggctgggaagttcaagatcaaggcattggcagacttgatgtctggtgaaggctgctgtccacttccaagatggcaccttgttgctgtgtcctccagaggggatgaatgctgtgtccttacatggcagaagggtgaaagtggcccagctagttccctggagcccttttataagagcactaatccgttcctgagggcagagccttcatgacctaaacacctccaaaggccacacctcttaataccgttgtattggggattaagtttcaacatgaattttggagggttcacaacattcaaaccatagcaatgtcttatagagtaatcgggatgattaaatgaaagaatgcccataaaacattgaacacatgcctgactctttgtaaacaataattattaggtatcgctattatagagaccagcttctgctgtggagagtgttaagtgccttgatgccacaagccactggacacgcagctgcatggatcaatgtacccctgtaattatgtaacaaggggacatggagaaaaaaacatttccaatgttgcctcctctgtaacatgattgtacccctaaactgcacagaggagctttctgttctttgaactccatagctgttggtacgtctcttgtggggtttgccatagtctgtcttatactatgactgttcttcactctacggtacatttctttctttctttgtttctttctttcttttttttttttgagacaaagtctccttgtgtcatccaggctggagtgcagtggtgcaatctcagctcacagcagccctgacctccccaactcaagcaatcctcacacctcagcttcccaagatgctgggactgctggcatgtgccaccacacctggctaattttttttgtattttttgtagaaatgggatttcaccatgttgctcaggctggtcttgaacttctgggctcaagcagtccacccatctcagcctaccaaagtactgggattgcagtgtgagccaccacgcctggcctactgtatgtttcttgaggtcaagattgggcactgggtaactgattacttgaattgaaccttgggattcagccagtgaaagtggtccacctggcagtagtgaacctctggctcctgacctctgctgctggtgaatctgtttctcctatggctgcacagacacagggtttcctgcctccaaagagcttttccactctgtacatgggacctgaaccggctccagaaaccttggagcctggcaccacttttcacatcacccagcaggagcagaacttagatggaccaggcatagatgggaaacatgggtttattgctaaggtcatggttagttctcggcggtggggcgggggggtttagtgggcaattgctttttggatttttgttttgttttagaagtaaaaaatatgggccaggcgcggtggctcatgcctgtaatcccagcactttgggaggccgaggcgggcggatcacaaggtcaggagattgagaccatcctggctaacacggtgaaaccccatctctactaaaaaatataaaaaattagccgggcatggtggcaggcacctgtagtcccagctactcgggaggctgaggcaggagaatggcgtgaacccgggacacagagcttgcagtgagctgagatcgcgcccctgcactccagcctgggcgacagagcgagactctgtctcaaaaaaaaaaaaaaagaaaaggaaaaatatgtacatttttaatagtggtagtaagaattttctgtaactacttacgggacatcttcactgaggggtctccagagctcctaaaactcagcactcccccagtgattcttacattttcctgccagacttgctcttcttcccacaatccccaccttaatggaatcatccacatccccctggtcacctgacagttgccctctatttctttattctcctcagcctcttttaatcagccaccaagtcttgtttgtccttcctccctaatgtcactcctgttttttgccgtgaggtctgatggcactagtgctgcctggggttgctactgcctcatctcttcaacctttttgtgtcacgatgtttaggagtttctttcataaacagaatgtggctggatttaaatcaaatctgacaatctgtcttaagtaatttatgtacatttttgggatttaacttaacgtattactgtattatattttttagtactttccatgtatttccatttttgcctatttttctccttccgagtttttttttttttttttttttttttggagatggagtcttgctctgtcacccaggctggagtgcagtggtgtaatctcagctcagcgcaacctctgcctcccaggttcaagtgattctcctgcctcagcctcccaagtagctgggactacaggcacgtgccaccacacgcggctaatttgtatttttagtagagacagggtttcgccatgttggccaggctggtcttgaactcctgacctcaggtgatccacccacctcggcctcccaaagtgctgggattacaggcatgagccactgctcccggcccggaattttctttatttctatacattttacttccgttgtttttttcttttttgagacagggtctagctcttttgcctaggctgaagtgcagtggtgtgatcacagctcactgtagctttgacctcctgggctcaagcaatcctcccacctcagcctcctaagtagctgagattataggtgcacaccaccatgctcagataatttaaaaaaaaatgttttctagagatgggatgttactgtgttgcccaggctcgtcttgaactcctcactcaagccctcctcccaccttggcctccaaaagtgctgggattacaggtgtgagccaccttacctggcctttatttctgttcttactccaacattttctcatcttttctcccatccttttacttagaaaaatgttaaaattagaggaaatagtacaatgaacatgagtattctctttaatcttattcaattaatatatttctctgtatatgtatatatgcttttgtttggaatcatttgaaattaagtgtggatttgttctccatcttcttgctcaggatttggtgtgctgcttttatctgaggactcatttataaaagaaaaaacaaagaaaaagcctttttactttaaaatgattgtagataaacttagctttacacagagtttctgtattccttcacccagcttcccctaatgttaatctcttacatttaattctttcttaagttctggaaaatttcagccattgcctctttggctttctcgttttctctacagtggcctctggaatgcctcttagacatattgttgagcattttaccaccaaagtctctatatttgttctttctgtgttcctttatctgtttaatcatccaagttttcttgtgtagtttctttgagactgtcttatttctgattcttgggatgctacttctctttttgtgtctgaggcttgcccctcttggtggtttatttccttgtgtggtttgtaactttgggtgtgagttcatctccaggagggattctcttttctggctgagacttgggtcctgaattatgaaagtatacctcagagcagcttgtttgcctctggcggggccatgagtgtttcagtggtcctggctcagtttttgttcactgcttagtgcggcacccctttactaccctagtagtgtaagttcagttttatatccatgggcaggactagcttggtggcttaagaaagggtgacctcccgccgggcatggtggctcacacctgtaatcccagcactttgggaggccgaggcagggggatcatgaggtcaggagattgagaccatcctggctaacgcggtgaaaccccgtctctactaaaaatacaaaaaattagccgggtgaggtggtgggtgcctgtagtcccagctgctgggaaggctgaggcaggagaatggcatgaacccgggaggcagagcttgcagtgagctgagatcacgccactgcactgcagcccgggcgacagagtgagactctgtctcaaaaaaaaaaaaagaaagggtgacctcccacccatacctgacccacagagccttggagaagtgttcagcttcttgttgctttcctttactgggcagccctttgaggctctcttcttgatactggggctcaaagccacaggcaggctttaaaccgcttcatttgtgggtgcgaaagtccacaggccattgtggtgtcagttccactcactgtttatgtttcaattcttctcgcacataggcatttctctttccaatttggctgcatgtctacggacgtcatttgttttattttatctggtatttttctgtgatagtggtggaaaggggaagctctttcacgttaatttagtcccgtatcctactgaaagtttgttcaaatgcttagcgtgtcatatgaagcttttcatgatgcagcccattctacctctcctgcataaacttagctcttaaattttacacttcagcaaattgaactatttgcataccatgtactgtaatgtttaaaagcacaggttttagggtccagctgtttggcttggaacctgtcttttcataaggtatgattttggacaagttacttatcccttccataactcagctttctcatctgtaaaatggcagcgtccggcatgcagtaaccctgatccctgttggctgcctctgtggttgctgcccccagcagttgaggctgccaggcctctgcgcaattgcactgtttattcctttgctggaattgcctgtctcccctcctctccttgatccctcccaggagagcagcctttactccttcagagcttggggtctctgtctgtagtaactatcactctgtgggtcgctgcttgtttacgtatctttttttttttgagacagagtgttgctctgtcgccaggctggagtgcagtggtgcgatcttggctcacggcaacctctgccttctgggttcaggccattctcttgcctcagcctcccacgtagctgggactacaggcgtgcaccaccatgcccagctaatttttgtatttttagtagagacggggtttcaccctgttggccaggatggtctccatctcttgactttgtgatccgcccgcctcggcctcccaaagtgctgggattacaggcatgagctactgcgcctggccacgtatctccttttttcagccgactctgacccccttgagagcagggtcttgtttttcttggtacttgaaactccttacattctacctgtcatttggtgggcattcagtgttggtagtttaattgcattgaatttctctggctgagtagaggcaagtgctgggagtggtatgggacgcagaggcagggaatgacagcaggaaagcttgttttttggcacattttgtgccaagttgatggaaatgtgaatcagtatggctgggacacaaggtaacaattcttagtctagctgaggatgccagagacttaaaacaagccagtggccagaaaaagccactaaatcttgcaaattaaagtggtttccagacttaagaatgcatgccccacattcccttcccaaactcagcgtctctgagtgccaggtggaggaatacaaactaattataatcctagtgggccctgagaatctttaattttagaataaggctgcacttctgaaaggcgcagttgctttaggagtaggtgactctgtatgcccggggcctccgaggagaccaggatgtgaaaactcagtacctggcatttagagctgtgtcacccatcacttctgacctcgttaagatttctaccctactgcgacttaacaactaaaaagggcagatgagataggtccggggcagagcttaatggcctgtgtcattctcctcagctttgcctgaattctctggactcttgagactctatcataggaatattctcagaagagaaggcaatcgaacctttaaagatccccagattatccatcagataacagtctcatgagagtgatgaacaatgacagcaccaactctcaattcccttggctggaatttcaggaatcagcttgaactcagaggtgggcacagggttagggcttggagtaggcgtcttttctttctttttttttttttttttcttttttgagatagcgtctcactcttgttgcccaggctggagtgcaatggctcaatctctgctcactgcaacctacgcctcctggtttcaagcgattctcctgcctcagcctcccgagtagctggggttacaggcatccgccaccacgctcggctaatttttgtatttttagtagagatggggttttaccatgttgcccaggctagtctcgaactcctgaccttgtggtctgcccaccttagcctcccaaagtgctggtattacaggcatgagccaccgcgcctggcttgcagtaggcatctttgcccaacccacgtgaatcccattagttctttcttgacagctctcagtctgtggtcatatattaagcaactatgtgttcagtactgtgctgggtgctattgctgaagatacggaaatagtaatgccacaagtccctcttcttagagaggagagcttgcactctagttggagagaattcctagcacacagaaagctgcaaccagtggtgcccaacagtaatgctgtctgatgccactgcatgcaagtgtgtccctttgacaacttggtgcttttgcccaaaaggagctgttctctttctgaggcttggactattcgtttgttttttctcagatgacttgctggcactgttacagactggtctgaattaactaggactaccttttatctgtttctgaggaatagccccaaatgtgctctctcttggtctttatgaacttttcctttcttccatttctccaaattatgatagattaactttgcagtgtcatctgctaatctccaaggtcttctaggggcacgtcatcagcagttgctgcttttgaggtatcaaggtttgtcctgtggagtctcagatagtttctttacctgttcaatgaatctgattttccatttttctaggagagtgtatctcaaagtgattgctgaatcagaatgtctgggagtgtgacttggaatctattactgaagattagaggaaaatgtagcaaattgtgatctgaagcatttatggatggattgatggattgatggatagggattctgactgagttaggtagtctatagtctcagacagttgtggaagctccattaggtcatgagcaacccagactccttccaattctgtgccctgccattcttagggtgtggctgctgtcctcatggtccaaaatggttgccgtggttccacatctcacagtgagatagaagaagacagaagaatgatgtctcacctcccttctaaggagacttcagcaaagcctgcctctaccactttctgtgactgagggaaagttaattcatactcagagccaattaacctcgtgttttttttttttgtttgttttttttttttttttttttttttttttttgagacaaggtcttactttgtcgcccaggctgtagtgcagtagcacaatctcggctcactgcagcctcgacctttcgggctcaagcagggctcctccctgctcagcctcccgagtagctggaactacaggcacatgcaccacacccggctaatttttaaattttttcgtagagattgggggtcttgttatgttgcccaggttggtctggaactcctgggctcaagtgatcctcctgccctggcctcccaaagtgctgggattacaggagtgagccactgcacccaaccagttacctcatttgtaaaacaggcatggtaacacttagtgcaggagcaagaggatcagggagcacacatacatacaaagtgcttggtgctgatgcccagcctgcagcacctgttctctaaatcatagcagcaattgctgctgcagcacacttctctttctcctctctccaccgctccatctctccagggtctctaccttgcctgtcaggctccactttcctttgctcctgccttttgcatctgttcctctctgcattctcccctcatctcctctcttccgtgcacctcattttcctgctcccctcctgcctctgtccctcatcttcttttcagagacttaaaaccagccagtggccactggcttttcagtgtctcctcctcctccttgaactacctcttccttctagtgcttctgtccttccctcctcctgacctccagtgaacaataattatttgtaacgtaatgacaaattatcgttacgttacaaagaccagaggttagaggtggtgattggccttgtaaactgtaggtcagcgatgagtaatttaagaaaactaaatttaattggtttactcatgagtcagttaggaattctatttggcagctagaacagaaatagcagtggcttaaaccagtagaaattttttctattgtgaaaagaaatctagggggacagtctagggcttgtctctccgctctgccatccttagtgcagggcgtccaaccccaaggttgtatcatggtctaagatggctgcgggagccccaaccatcatgtcaggttctaggaagaaagcaggaagaagagaggaaaggcaaaaagaacacatgctccatcttaaggagctttcctgcaagtcccaccaaatagcttcagcttctcctccttgcctccattagttgcaagggaggctgagacatcatttagctgagcacattgctacctgaggtagaattgggattctgtcaccaagaaagaaggggagaatggatattgtgtaaacaattagcaaggtctgccgccattcattcaacattaatttagcacctacaatctactagttatgaagaacagtcaaggtgccccattccagagggaagacatagataagtaaacaagtacagtacacaggatgggtgaggaagagggggagagtggagaaaggcatgaagtgggtatcttacataccctccaagggcgcattctagagttcgtcatgcagacattcttgcctgtggtttgtttcctcttctgctctctcctttttgtcattgtcgccattgttgttgttggggtttgtttttgcccctccattctgacgtcagcagtagcccctagaaccttaggaaacagaaacagttggcctagtgggaagctctgggatgggagccatgtgtttgaagagccaagtcccagggccattaggcaattagaggcctgtggcaggagagcattcgttcctggacatgccgtggcactgccaggagactttactccaggaatggggtcgttgtcaggaggcatgttctaaccaggcacctggcatcacctatactgtgcttgccataaaatgaaattttggagcagtaaaattctccaggtcccgtgaaatgggtataattgtttcacccacattaatttaaccagaggtcttggtatgctatagtgttaattatgtgtaaaaatacttctacttactataaaatgtattgacagttagacattgatattccttcttagaactcaaaaattctaggaataacttgggagacccacattatctttcattttgatcccaagaacatctattgctgtttcctttgggaagttagagaggcaatgggaagcctgctgcagagattttctaaacaggcatatcccagcccctaaggagtttgaaagtgtcagagaaggctaaaggattaaaagatcgtttgttctggcacagtgcaatccttatgaggttgtactgtgaccctgggcaagttaccatcctatcctcagtttcttcatctgtcaaattttgatcctgtggaccctccccaacagggctgtgatggaaatgaagagacacatgggaagcattcagtatgtgttgttgttattatcatcattattgttatttttattattattagtgctactggtagtgctagcccactagcccactgggcagcgactgcacccgtatcagagtgtggaaagccttggatgccacattaaggagttggattttgtgggcaagggtgtgacaggtcatggctgggcttagaaatgtcactgacaggagtggagaggcagatctaggtgaggagtgggcagggcttgaacctggccagtcaaggaaaggggagaatggatacctgagtggtgagggaggacccactggtgctggagttcagcctgtgtgcccaagggatggtgtcccattgacttgggtgggaagcactagaggtggagcagttggggtggcaggaggggaaagaagcatatggtgatcagctcagcaaacaaatgggtaacttgcgcactcagtgctcggtggtgcccaggctggagtgcagtggcgtggtcccggctcgctacaacctccacctcccagccgcctgccttggcctcccaaagtgctgagattgcagcctctgcccggccgccaccccgtctgggaagtgaggagcgtctctgcttggccacccatcgtctgggatgtggggagcccctctgcctggctgcccagtctgggaggtgaggagcgtctccgaccggccgccatcccatctaggaggtgaggagcgcctctttccggccgccatcacatctaggaaggaggagcgtctctgcccggccgcccatcgtctgagatgtggggagcgcctctgccccgccgccccgtctgggatgtgaggagcacctctgcccggccacgaccccgtctgggaggtgaggagcatctctgccccgccgccccgtctgagaagtgaggagaccctctgcccggcaaccaccccgtctgagaagtgaggagaccctccacccggcagctgccccgtctgagaaatgaggagcctctccgcccggcagccaccccgtctgggaagtgaggagcgtctccgcccggcagccaccccgtccgggagggaggtggggggggtcagcccccccgccaggccagcagccccatccgggagggaggtgggggggtcagccccacgccccgccagccgccccgtcagggagggaggtgggggggtcagccccccgccaggccagccgccccgtccgggagggaggtcggggcgtcagcctcccgcccggccagccgccccgtccgggaggtgaggggcgcctctgcctggccacccctactgggaagtgaggagcccctctgcccggccagcggccccgtccgggagggaggtgggggggtcagccccccgcccggccagccgccccgtcagggagggaggtaggttcagccccccgccaggccagccgccccgtccgggagggaggtcggggcgtcagcctcccgcccggccagccgccccgtctgggaggtgaggggcgcctctgcctggctgcccctactgggaagtgaggagcccctctgccaggccagccgccccgtccgggagggaggtggcggggtcagccccccgcccggccagccgccccgtccgggagggaggtgggggggtcagccccccgcccggccagccgccccgtccgggaggtgaggggcgcctctgcccggccgcccctactgggaagtgaggagcccctctgcccggccagccgccccatccgggagggaggtgggggggtcaggccccgcccggccagccgccccgtccgggagggaggtgggggggtcagccccccgcctggccagccgccccgtctgggaggtgaggggcgcctctgcccggccgcccctactgggaagtgaggagcccctctgcccggccagccgccccatccgggagggaggtgggggggtcaggccccgcccggccagccgccccgtccgggagggaggtgggggggtcagccccccgcctggccagccgccccgtctgggaggtgaggggcgcctctgcctggccgcccctactgggaagtgaggagcccctctgccaggccagccgccccatccgggagggaggtgggggggtcagccccccgccgggccagccgccccgtccgggagggaggtgggaggggtcagccccccacccggccagccgccccgtccgggaggtgacgggcgcctctgcccggccgcccctactgggaagtgaggagcccctctgcccggccaccaccccgtctgggaggtgtgcccaacagctcattgagaacgggccaggatgacaatggcggctttgtggaatagaaaggcgggaaaggtggggaaaagattgagaaatcggatggttgccgtgtctgtgtagaaagaagtagacatgggagacttttcattttgttctgtactaagaaaacttctgccttgggatcctgttgatctgtgaccttacccccaaccctgtgctctctgaaacatgtgctgtgtccactcagggttaaacggattaagggcggtgcaagatgtgctttgttaaacagatgcttgaaggcagcatgctcgttaagagtcatcaccactccctaatctcaagtacccagggacacaaacactgcggaaggccgcagggtcctctgcctaggaaaaccagagacctttgttcacttgtttatctgctgaccttccctccactattgtcctatgaccctgccaaatccccctctgtgagaaacacccaagaattatcaataaaaaataaataaatttaaaaaaaaaaaaaaaaaaaaacaaat

SEQ ID NO: 933 - DNA, 117 bp, Homo sapiens
tttttttgtgtatttttagtagagatggggtttcaccatgttagccaggatggtctcgatctcctgacctcgtgatctgcctgcctaggcctcccaaagtgctgggattacaggcgt

SEQ ID NO: 934 - DNA, 684 bp, Homo sapiens
cgagtacctactgtacactcatgagtgctaggcagccagccttccaggtgctcaggtacatctgtgaacacaactggctattggaggaagcaaaatcagtaacatgacctgctctctttgatctgtgctacagaaaaaaaggaaagtggagaggcatcaggaagtcaagagtgctggggaggggctggtaacagtcatggtattaaagaggagggcaggcaggccttactgtgaaggtggtatttgagatgaagtagttggtcagagtccctgtttgacacatggagaccaccttgacagcaaaggccctaagggggagcggtgcgaagcaaggtgggctggtgagtgagaggagagggatggcatagagctgggtgggggcacaggagcccgtggggaaggtgttcgcctctgaatgaagtggggttgtatcagataccacgggtgaagcatcgggaagaggatcctgcctgtaaaccctgctcaaggactgcaccatcatcatgcccagtgtgtgcgtgtattaggtttgtatgaatataatgttgccaattgtatctgtttttatgaaatgtttgctatgtgccaatgattattcgatccatggggagaccatagaagaatgatccaaggagttgggaggggaatcaaataataaatcagcgattctgcaatataacgcca

SEQ ID NO: 935 - DNA, 456 bp, Homo sapiens
gaagcccttgtttgtgaacagtgattgtttcccggatgacagccagatgccgggcagggccacgcagatcttagctggagcctacaggtacaagtgagagccaccccctttgacgtaactggactggcatttacagaactcatgtacagcccactctcaggaacaccagccaggaaccgtgacatggaggagaggaattgggaggaaccgaggggtcatcaaaggctggtagggcttaggtgctctagcaaacatcctagtctgtggggttccagagctctggtgctacagctcccaaccctttgattggcccaggaactggctgttgagtgggcatccgtgttcatagctctgccccttgcaaccctaaagcagataaaatgcaggaggcagaaattgctggcagacagcatccaattaatccccactacccaattcagtttcttcccctgacct

SEQ ID NO: 936 - DNA, 6259 bp, Homo sapiens
cttcatgctgtcagaataatttcttgacttagaatcagagaatcctagacttttctcccctctaaaattaactacatgtctgaatttttctccctctcttctgaatcctcagaaagcaagccctcttctctacactccccagttagaagatgcatctctttctctttagtgaccataaaactagacacacagtcagccttctgcatctgtggattcaaccaaccatggattcaaaatatttgaggaaaaaaaaagtacctctttactgaatatgtatatactgttttccttgtcatgatttcctaaacaatacagtataatggtgatttatataatatttacataatattaggtgtcataagtaatttagagatgatttaacttatatgggagcgtatgtgtaggttgtatgcaaatactacacgatattttatcagggacttgagtgtctgtggattttggcatcctcggggggtgcttggaaccagtccccctggatacctgaggagtgactgtactgtgtgatagcagcagtatgggatggaaagatgagatcctagtggtgcaggtacatcagttggacatttggtgtaactcaccaaaagtgaaaaaaacagagaaacaatatttgtggtgaattaagagattgagaagcaccgaattgaattgagaggtggttttgacttcctgaaatctccccacaccattttataactcctcagtttttccatttagctttaccttcttctgtgacagagattcattcattgtctttccttactatgctttaagcaactcttacacttctgtatagaaaaggtgtttcattccctcttttcattttgatcaacatatctatatagctaccctcaggattttgaagtcataaatgtgggcatttgggagggtagcatgagaagagcatttaattaaaaatagctatattgtgtttctttattttagagtactattaatcccgtagatgcaatatatcaacctagtcctttggaacctgtgatcagcacaatgccttcccagactgtgttacctccaggtaatttgggaaaatgtttcttagattcattgatgagaaaaaaataatttgtgtggctgtcatagcagtcttagctattactgtttatttttgattttccttgtttttaataaaagcactcaaaaaataatacagccaaaagtgaactgaaaaaagatgataatgttttgatattggggctttactgaagtgtgatgaaagtggttttgttattcaaagtgagatagaaaacaaacttggttactacgatttggattcactggtagaacaggattctatgactcagaattcatggctagcgaggaaaaattactataccttattctggataatccagggatgttccgttttggggtattctgtgtagctctgaacaatacaaatggtatgttcatggtagattttaagataatgagaaagtgaagagggaaatttatgatgcctactgatcacatgacatctgggttttgttttgttttttttttttttgtataaagcaatacatgcaattttttaaaaactggcaaagaagggctcagggccaatacctagctacactgactgattccttttgcccttttgttatatccaacatttctatgttctcgatggcatagtgaagtcagaaattgtactgtaaaatggaaaactctttttaaaagtactagtaagtatgtgaaatccttttgtgagtttttacttcttaagtgaattagcttaaactacctcttggggctaaagaggaacaggtactgtactccacttcagattttttgtggtttgaggctcagaaacacattatcatcagaagcatttgttggttttacagcatagttatactgcagtattggcctactgtggctggttttttgatatcctgcctggtatcttagtactctgtagcctatcatcattgagtttaagaggctaggaagtcaaaaggaaggagtagcatggaactagacttaatgaaataaagtttcaaaaattactggcctttaggattttgaatcccagacaattacagtcaatagaatgtgtgtttggctgtttctgtaccttattttatacgttcaaatctcctagaacctgttcagttgtgtaagtcagagcagcgtccatcttccctaccagttggacctgtgttggctaccttgggacatcatcagactcctacaccaaatagtacaggtacagatttgcataatttctttatgtctcataactctattaacatttgaggtttgtttgtgacctctgatgaggagggggaaagttgaagaaatgtgttgtatattttctgttggagatatgttagttttaacattatagttccatacatgaagtggttagctttgtgtttgaaagagaagctttagttaagttttatttatttttaagtttttaaaatttttatttttgagacagggtctcactctgtcattcaggctggagtgcagtggtacgatcagggctcactgtagttttgacctcccaggcctcaggctcccaagtagctgggaccacaggcacacacaccacacttggctgatttttaatttttgtagagaggagtctccctatgttgctcaggctggtctcaaactcttgggctcaagcagtcttcctgcctcagcctcccagtgtgctgggattatacaagcatgaggcaccatgcctggaataatttaaataaaataaaatattacagagttttgtttgtttgttaccttaacatttatttggtgatctatgttgactttttgaaaaatttactccagctagacttgcatactttcttattatgaagctgacacagaagtgcacagaataaaaactgcaagtcctctttactctccccccagtaatttgcatacatgtatgtgcatatacacttatgtcgtgtatttttattgtttttgtttaaacctaacttaggttatgtgtttctgtgacttgcgtttttcctttaacaaagaacacttagagcactttccatgtttgtaaaattaggtctacagcattctttttacagctgcctgggcaggtattgcttgttttttccactgatggaagcaatacttcagtgatatccttgtacagcacctttggcatatgtatatttttttagaaaacatttatcagtctttcacctttttgccagttttatagttagaaaaaagatacttcattttaatttgcattttctttttgtttgtttaaacgttttgttttttgtttttgagatggagtctcactctgttgcccaggctggagtccagtggcactgtcttgactcactgcaccctccacttcctgggttgaggtgattctcctgcctcagcctcctgagtagctgggattaaagatgtgcgccaccacgccccacaaatttttgtatttttagtagagacggcatttcactatgttggccaggctggtctcgagcttctgacctcaggtgatctgtccacctccacctcccaaagtgctgggattacaggtgtgagccaccgcgcccagcctgcattttcttaattcgtttaggcttagggtctttattttttctctgttttacagggatactatcagtgttagatactagatttatcttgttttaaaattaattaaatgtatgttgaataacttgtagaaccaaactcaaggaagcatctagcacttttcacactgttaaacctggaaaccaaaaccaaaaccactcttgaagaagtgggagatcagccccttttgttcatcctcagatttttttcccgggtaggatttttcctgtgtaatgatgaataattaccctgtgatttaaaaaattcgaattagtaaaagtactgatgctattactttgatctttactatttaacagcatgggcagttgcctttgaattttgaaagaaaaaaaatagctctcttacttgaagctcttgggaaaaggctgataagcaatttgaataatgaaattgaaatattttggctgacttctgtatttcctgagctgtgtcacctcttcttcatttaaaaaatagtacctgtttgttgttgttcgtatttttatgttggaattttgaaacaaccaaaattccaaaatttttctgtttggaaatacgtaaaactagcaacagactttgagaaagtgagaagctcttcttatgtatattaatttttgtaaaaattactccagaagataatcttctgaaaactatttcagttgaaggtatttcaaaaatctaacactttagagtagatttaaagaaaaatttaaaattaaattcctgtgatttatatcttatttgatttttcatcctaacttcattttctccacttttctttcccttacttctcttgttaatacaaaaaagaaataaaggaataagataaaatgtttgctctcctaagtaaatctcagatcttttgtttgcagttcccactcaaacttttcttcttagatacagtttcacttgtgtgatcacctggaatatttgcatgctacttaatcatttgcaattcttgatcaattttttttttattccaataagaaaaagctgcttttctctcttactttttctgttgggtaataaaaagaatatgaagttatttactaataaggtgagctacctttggaatttccaaaataagcattaccttttaggggttaaactttttgtgttatctttttaaaatacctttgtgaatatgatgactaaatgtggcaaactgatgtgctttttttcacaactattgaaccatacatataggaatgggcaaaaaatccgtaagtgactctggattcttttttttttttttttgagacaaggtctcactctgtttacccaggctgtaatgcaatggcacaaacacaactcactgcagcctcgacctcctcagattaagtgatcctgccccagcctgtcgtgtagctgagaccacaggcacatgccaccatgcccagctaatttatttatctatttttttaagagatggggctctcactttgttgcacaggctggtcttgaactcctggcctcaagcagtcctcccaactggtcctcccaaagtgctggaattacaggcatgagccattgtgcctagcctggattcatttttattgctgtcttcaatttcttccagaactgtggccctggctttcagattgccatcagtgtcttaataaactttagtcttcaccagacatctgtagattagtataaattgcctgactgacagcccttaaatgctcagtaagttaaattgatcttaatactccatttgtcgattggtttgatacttttttgttcttgctttactagtagataaggtaccagatgatcatctcagagattagatggcaggcttctttgtctgggtcttcattaatttccatttctttagttagactatttaggaatagaaaaatgttcttctgaatcttttcattttctgcattcttctcatcgtagtcctctatttttatctccacctctgagcccctgacttaggtggaaaagaggagaggaatttggatggtgtgtgtattttccatgtgattgccaaaaaatattgaatgataggaatgtgatatcctgcaatattttaatgtttatgtggtcttaatattcttttcattttgcattcccagtggctcactgctgcatttttaggtatctggatctgcagtgtaaaataagagtcccggcatcccattgtaatcatatctgttgttggacttgcaactccacaactcatataatcaaaagggcccccttcctagtattaatgataatctttaattatagaatgaggacatagctttttgtttcatttatttaaaaggctgtgtcctcattttatatcatgatttgccattttctgtgtggagtttaaatgttgattttctttataaatactgtagcgacttttacaaacttaaccaaactcttttttgattttagaaaagtctgctttgactccatctccctagtttcttctctttcaccaatatttttctctaaaacccttttaacttcctaggcagtggccattcaccaccgagtagcagtctcacttctccaagccacgtgaacttgtctccaaatacagtcccagagttctcttactccagcagtgaagatgaattttatgatgctgatgaattccatcaaagtggctcatccccaaagcgcttaatagagtgag

SEQ ID NO: 937 - DNA, 6260 bp, Homo sapiens
cttcatgctgtcagaataatttcttgacttagaatcagagaatcctagacttttctcccctctaaaattaactacatgtctgaatttttctccctctcttctgaatcctcagaaagcaagccctcttctctacactccccagttagaagatgcatctctttctctttagtgaccataaaactagacacacagtcagccttctgcatctgtggattcaaccaaccatggattcaaaatatttgaggaaaaaaaaagtacctctttactgaatatgtatatactgttttccttgtcatgatttcctaaacaatacagtataatggtgatttatataatatttacataatattaggtgtcataagtaatttagagatgatttaacttatatgggagcgtatgtgtaggttgtatgcaaatactacacgatattttatcagggacttgagtgtctgtggattttggcatcctcggggggtgcttggaaccagtccccctggatacctgaggagtgactgtactgtgtgatagcagcagtatgggatggaaagatgagatcctagtggtgcaggtacatcagttggacatttggtgtaactcaccaaaagtgaaaaaaacagagaaacaatatttgtggtgaattaagagattgagaagcaccgaattgaattgagaggtggttttgacttcctgaaatctccccacaccattttataactcctcagtttttccatttagctttaccttcttctgtgacagagattcattcattgtctttccttactatgctttaagcaactcttacacttctgtatagaaaaggtgtttcattccctcttttcattttgatcaacatatctatatagctaccctcaggattttgaagtcataaatgtgggcatttgggagggtagcatgagaagagcatttaattaaaaatagctatattgtgtttctttattttagagtactattaatcccgtagatgcaatatatcaacctagtcctttggaacctgtgatcagcacaatgccttcccagactgtgttacctccaggtaatttgggaaaatgtttcttagattcattgatgagaaaaaaataatttgtgtggctgtcatagcagtcttagctattactgtttatttttgattttccttgtttttaataaaagcactcaaaaaataatacagccaaaagtgaactgaaaaaagatgataatgttttgatattggggctttactgaagtgtgatgaaagtggttttgttattcaaagtgagatagaaaacaaacttggttactacgatttggattcactggtagaacaggattctatgactcagaattcatggctagcgaggaaaaattactataccttattctggataatccagggatgttccgttttggggtattctgtgtagctctgaacaatacaaatggtatgttcatggtagattttaagataatgagaaagtgaagagggaaatttatgatgcctactgatcacatgacatctgggttttgttttgttttttttttttttgtataaagcaatacatgcaattttttaaaaactggcaaagaagggctcagggccaatacctagctacactgactgattccttttgcccttttgttatatccaacatttctatgttctcgatggcatagtgaagtcagaaattgtactgtaaaatggaaaactctttttaaaagtactagtaagtatgtgaaatccttttgtgagtttttacttcttaagtgaattagcttaaactacctcttggggctaaagaggaacaggtactgtactccacttcagattttttgtggtttgaggctcagaaacacattatcatcagaagcatttgttggttttacagcatagttatactgcagtattggcctactgtggctggttttttgatatcctgcctggtatcttagtactctgtagcctatcatcattgagtttaagaggctaggaagtcaaaaggaaggagtagcatggaactagacttaatgaaataaagtttcaaaaattactggcctttaggattttgaatcccagacaattacagtcaatagaatgtgtgtttggctgtttctgtaccttattttatacgttcaaatctcctagaacctgttcagttgtgtaagtcagagcagcgtccatcttccctaccagttggacctgtgttggctaccttgggacatcatcagactcctacaccaaatagtacaggtacagatttgcataatttctttatgtctcataactctattaacatttgaggtttgtttgtgacctctgatgaggagggggaaagttgaagaaatgtgttgtatattttctgttggagatatgttagttttaacattatagttccatacatgaagtggttagctttgtgtttgaaagagaagctttagttaagttttatttatttttaagtttttaaaatttttatttttgagacagggtctcactctgtcattcaggctggagtgcagtggtacgatcagggctcactgtagttttgacctcccaggcctcaggctcccaagtagctgggaccacaggcacacacaccacacttggctgatttttaatttttgtagagaggagtctccctatgttgctcaggctggtctcaaactcttgggctcaagcagtcttcctgcctcagcctcccagtgtgctgggattatacaagcatgaggcaccatgcctggaataatttaaataaaataaaatattacagagttttgtttgtttgttaccttaacatttatttggtgatctatgttgactttttgaaaaatttactccagctagacttgcatactttcttattatgaagctgacacagaagtgcacagaataaaaactgcaagtcctctttactctccccccagtaatttgcatacatgtatgtgcatatacacttatgtcgtgtatttttattgtttttgtttaaacctaacttaggttatgtgtttctgtgacttgcgtttttcctttaacaaagaacacttagagcactttccatgtttgtaaaattaggtctacagcattctttttacagctgcctgggcaggtattgcttgttttttccactgatggaagcaatacttcagtgatatccttgtacagcacctttggcatatgtatatttttttagaaaacatttatcagtctttcacctttttgccagttttatagttagaaaaaagatacttcattttaatttgcattttctttttgtttgtttaaacgttttgttttttgtttttgagatggagtctcactctgttgcccaggctggagtccagtggcactgtctcgactcactgcaccctccacttcctgggttgaggtgattctcctgcctcagcctcctgagtagctgggattaaagatgtgcgccaccacgccccacaaatttttgtatttttagtagagacggcatttcactatgttggccaggctggtctcgagcttctgacctcaggtgatctgtccacctccacctcccaaagtgctgggattacaggtgtgagccaccgcgcccagcctgcattttcttaattcgtttaggcttagggtctttattttttctctgttttacagggatactatcagtgttagatactagatttatcttgttttaaaattaattaaatgtatgttgaataacttgtagaaccaaactcaaggaagcatctagcacttttcacactgttaaacctggaaaccaaaaccaaaaccactcttgaagaagtgggagatcagccccttttgttcatcctcagatttttttcccgggtaggatttttcctgtgtaatgatgaataattaccctgtgatttaaaaaattcgaattagtaaaagtactgatgctattactttgatctttactatttaacagcatgggcagttgcctttgaattttgaaagaaaaaaaatagctctcttacttgaagctcttgggaaaaggctgataagcaatttgaataatgaaattgaaatattttggctgacttctgtatttcctgagctgtgtcacctcttcttcatttaaaaaatagtacctgtttgttgttgttcgtatttttatgttggaattttgaaacaaccaaaattccaaaatttttctgtttggaaatacgtaaaactagcaacagactttgagaaagtgagaagctcttcttatgtatattaatttttgtaaaaattacttccagaagataatcttctgaaaactatttcagttgaaggtatttcaaaaatctaacactttagagtagatttaaagaaaaatttaaaattaaattcctgtgatttatatcttatttgatttttcatcctaacttcattttctccacttttctttcccttacttctcttgttaatacaaaaaagaaataaaggaataagataaaatgtttgctctcctaagtaaatctcagatcttttgtttgcagttcccactcaaacttttcttcttagatacagtttcacttgtgtgatcacctggaatatttgcatgctacttaatcatttgcaattcttgatcaattttttttttattccaataagaaaaagctgcttttctctcttactttttctgttgggtaataaaaagaatatgaagttatttactaataaggtgagctacctttggaatttccaaaataagcattaccttttaggggttaaactttttgtgttatctttttaaaatacctttgtgaatatgatgactaaatgtggcaaactgatgtgctttttttcacaactattgaaccatacatataggaatgggcaaaaaatccgtaagtgactctggattcttttttttttttttttgagacaaggtctcactctgtttacccaggctgtaatgcaatggcacaaacacaactcactgcagcctcgacctcctcagattaagtgatcctgccccagcctgtcgtgtagctgagaccacaggcacatgccaccatgcccagctaatttatttatctatttttttaagagatggggctctcactttgttgcacaggctggtcttgaactcctggcctcaagcagtcctcccaactggtcctcccaaagtgctggaattacaggcatgagccattgtgcctagcctggattcatttttattgctgtcttcaatttcttccagaactgtggccctggctttcagattgccatcagtgtcttaataaactttagtcttcaccagacatctgtagattagtataaattgcctgactgacagcccttaaatgctcagtaagttaaattgatcttaatactccatttgtcgattggtttgatacttttttgttcttgctttactagtagataaggtaccagatgatcatctcagagattagatggcaggcttctttgtctgggtcttcattaatttccatttctttagttagactatttaggaatagaaaaatgttcttctgaatcttttcattttctgcattcttctcatcgtagtcctctatttttatctccacctctgagcccctgacttaggtggaaaagaggagaggaatttggatggtgtgtgtattttccatgtgattgccaaaaaatattgaatgataggaatgtgatatcctgcaatattttaatgtttatgtggtcttaatattcttttcattttgcattcccagtggctcactgctgcatttttaggtatctggatctgcagtgtaaaataagagtcccggcatcccattgtaatcatatctgttgttggacttgcaactccacaactcatataatcaaaagggcccccttcctagtattaatgataatctttaattatagaatgaggacatagctttttgtttcatttatttaaaaggctgtgtcctcattttatatcatgatttgccattttctgtgtggagtttaaatgttgattttctttataaatactgtagcgacttttacaaacttaaccaaactcttttttgattttagaaaagtctgctttgactccatctccctagtttcttctctttcaccaatatttttctctaaaacccttttaacttcctaggcagtggccattcaccaccgagtagcagtctcacttctccaagccacgtgaacttgtctccaaatacagtcccagagttctcttactccagcagtgaagatgaattttatgatgctgatgaattccatcaaagtggctcatccccaaagcgcttaatagagtgag

SEQ ID NO: 938 - DNA, 315 bp, Homo sapiens
cgtctttttttttttttttttttttttttttgagacacagtctttgtcgcccaggctggagtgcagtggcgccatcttggctcactgcaagctccgcctcccgggttcacgccattttcctgcctcagcctcccgagtagctgggactacaggcgcccgccaccacgcctggctagttttttgtatttttagtagagacggggtttcaccgtgttagccaggatggtctcgatctcctgacctcatgatcagcccgcctcggcctcccaaagtgctgggattacaggcatgagccaccgcgcccagccttttttg

SEQ ID NO: 939 - DNA, 274 bp, Homo sapiens
ctttgtcgcccaggctggagtgcagtggcgccatcttggctcactgcaagctccgcctcccgggttcacgccattttcctgcctcagcctcccgagtagctgggactacaggcgcccgccaccacgcctggctagttttttgtatttttagtagagacggggtttcaccgtgttagccaggatggtctcgatctcctgacctcatgatcagcccgcctcggcctcccaaagtgctgggattacaggcatgagccaccgcgcccagccttttttg

SEQ ID NO: 940 - DNA, 742 bp, Homo sapiens
ttttgaaaaaatagaggaactattcatggaataggccttagaggcaggctgcttgggttcaaataaaatagccctgccactcactacctgtgaccttggcaaattacttaacctttctgagtcttaatttcttttcctgtaaagaaagctgaaatgttctaccttagaagtttgttgtaaggtacagaacaagcgcatagtattcaatgaatgttagctatatgtacatgtatgtgtatgtgcaatacattgtattacgtgggtttcattaatgtcaaaacagattagggctgagtagtattatttttgcttctcaagttctgcacatttatttttaaagcaagttgtagaatgtaatgtgacatatttgagcctgaagttggctgaccaaggactgtggataagtgtagcatagttattttttctatcaaaaacaataacaaaaagattgagtacttttaatatacatgttgtcaaaagacaaaattacaacaaatttaatcatagatctaattggcttttattcaagatgcatgaatcggatcagcctccattctacaaaatagaatgagaggtctcactgggcagtggcaaagcagtgggttttgtaaggtgagaactgtaacaggaaaaaatgctgattggttaacatcagattacttttcttttaagggttaaaacagtgagcatttccgtattacactgattcgggtagactggaatctcctattttcagaaaaaa

SEQ ID NO: 941 - DNA, 813 bp, Homo sapiens
aatccccccagttttatttttttattttttgtcatatctgattcaatacttttatttatttttattttttatttttgagacagcatcttgctctgttgcccagtgtggagtgcagtggtacaatcttggctcactgcagcctcaacccccgggctcaatcaccccaatttcatatcagactcacttgcttataacagcacacttcaaatccttctcagaccattttccaaccactaagaatcagtatatttcatgccagcttctgtcctagatactatggctataacacagttttcaaggaactcacaatttggagagagagagagaaatactaagtatgtaactagctgtcatagttctttaaaaaaaaaaaaagaaaaaaaagtaaggccaggcgcggtggcttatgcctgtaatcctagcactttgggaggccgaggcgggtagatcacctgaggtcaagagtttgagatcagcctgaccaatatgatgaaaacccgtctctactgaaaatacaaaaattagccgggcatggtggcatatgccatcatcccagctactcaggaggctgagacaggagaatcacttgaatccgggaggcagaggttgtgtagagccaagatctcgccattggactccagcctgggcaacaagagcaaaactctgtctcaaaaaaaaaattaaaataagtaaataaataaaaataaaaaataataagatagacctgattgtggtggctcatgccccgtaatcccagtgctttggaaggccaaaatgggaagatcacctgaggccaggagtttgagaccagcc

SEQ ID NO: 942 - DNA, 813 bp, Homo sapiens; identical to SEQ ID NO: 941

SEQ ID NO: 943 - DNA, 306 bp, Homo sapiens
tatagatcactgacaaagtatctgttttagcagatagggacaaagtttaaataatttggccaaggtcatagtagaccaagatttggacccagcacaagcatcctctttccaggaaaccttccctcaggcccttagttggtttaagtgccctctctctgtactattagcatatgcacacacattcattttagcgttgactttaataataaggatgtttaccatgtaccagatacatagtacttgcacctgtgttatctatgtttaagtgttttgtaggcattagttcatttaagcctcataactgcc

SEQ ID NO: 944 - DNA, 306 bp, Homo sapiens
tatagatcactgacaaagtatctgttttagcagatagggacaaagtttaaataatttggccaaggtcatagtagaccaagatttggacccagcacaagcatcctctttccaggaaaccttccctcaggcccttagttggtttaagtgccctctctctgtactattagcatatgcacacacattcattttagcgttgactttaataataaggatgtttaccatgtaccagatacatagtacttgcacctatgttatctatgtttaagtgttttgtaggcattagttcatttaagcctcataactgcc

SEQ ID NO: 945 - DNA, 954 bp, Homo sapiens
gggaaatgagttaagaggggtcccgaaatctgtagagtgctggtttgggggctcgccatcccaaatctgttccagcctgtcctgaggaaaatggagtgtaattaagggtgagcacccttaattcttgagctgtctttccagatacacctcgctgcttggagattcagtgaacctaagaaaaggtgcaaaaactatttaggtcaacttggagagcaggggaaggaagaaataagaaataaagaggtaccgaaagctggaacatacttcggagaaacacctaggccagccctctcactggaaacacagcacagcacagaacaaaacagacacagctcctgtcccgcgggctgacagccaagtaggagagatgaatgttcaacaatcttgcacataagcagtaagtgccatggtgttagccagcgttctccagagaaacagaaccaataggatggatatacagagatatagaaaaagatttattatgaggcattagctcccatgattatggacgctgagaagtacccaggatctgccctccgcaagctggagtagttccagtccgcgtctgaaggtgcaagaatcagagcatggatgtctgaagcagggaaaatatggtgtcccacctcaaagaagagcaaatttgcccttcctctgcctttttattctattcaggtccttaacagattaaattatgcctgcccatagcggtgagggcggtcttctttactcagtctactgattcaaatactaatctcttccagaaacagcctcacaaatacacctagaaataacattttaccagctatttgagcatcccttagcccagtcaagttgacacttaaaattaaccatcacggtggctcaagcctgtaatcccagcactttgggaggccgaggcgggcggatcacttgaggccgggagttccagacctgcctgaccaacatggtgaaacc

SEQ ID NO: 946 - DNA, 829 bp, Homo sapiens
gggaaatgagttaagaggggtcccgaaatctgtagagtgctggtttgggggctcgccatcccaaatctgttccagcctgtcctgaggaaaatggagtgtaattaagggtgagcacccttaattcttgagctgtctttccagatacacctcgctgcttggagattcagtgaacctaagaaaaggtgcaaaaactatttaggtcaacttggagagcaggggaaggaagaaataagaaataaagaggtaccgaaagctggaacatacttcggagaaacacctaggccagccctctcactggaaacacagcacagcacagaacaaaacagacacagctcctgtccccgggctgacagccaagtaggagagatgaatgttcaacaatcttgcacataagcagtaagtgccatggtgttagccagcgttctccagagaaacagaaccaataggatggatatacagagatatagaaaaagatttattatgaggcattagctcccatgattatggacgctgagaagtacccaggatctgccctccgcaagctggagtagttccagtccgcgtctgaaggtgcaagaatcagagcatggatgtctgaagcagggaaaatatggtgtcccacctcaaagaagagcaaatttgcccttcctctgcctttttattctattcaggtccttaacagattaaattatgcctgcccatagcggtgagggcggtcttctttactcagtctactgattcaaatactaatctcttccagaaacagcctcacaaatacacctagaaataacattttaccagctatttgagcatcccttagcccagtcaa

SEQ ID NO: 947 - DNA, 1593 bp, Homo sapiens
  misc_feature (195): n equals a,t,g, or c
ggccgccgcaccgccgcctgccccaccgcaccacggggccgccgcgccgccgccgggccagctcagccctgccagcccagccatccgccgcccccggcgccggcccaccagtgcgccgggcctgcagttcgcttgtgcccggcagcccgagctcgccatgatgcattgctcttactgggaccacgacagcaaganccggcgctgattcgcgcctcgatctctgagagcccaccgcatgccggtgcagacggatgcgaggatgcagggacgcgcgacgccggccccggtcgcagccgacgacgccgccgccagcctgacctcacaccctctgggcccgcctctggagccagcgcccagggtccctctgtgctttttcgctttcctaagctcctgtcgctcctctttgtcccctcagtttatgtcctcctgtgctcacctccctgacctctgtgaccttgcactcccctggcctgaagctgcctctctgcgcgctttctactgggctcgtctctttccggagccccagcgtctcctgcccaaattcaccgcggaaagggcccggggcggaggtgcgaccgggcgtcggcagcgcagacctcttggccttctctcacaggtcggtgcgctcgctctccgcgttccccgcccgactgccgtgcagtccatggctagacgcgccggacaggactgatggcgggaccgcgctgcccgagaaagggacggaccaatacgtgtgtttgctccgcgaaccctcttgaagctgttcagaagccgcttgccgcggggcccactaggcggggcgggggttgggacccagcgggagccggggcagcctggctccacggcctgtactcggtttaacaccgcgggcgggcgcggagggaggctgcgtttcctccgctatcagtcccgtcgcttcgggcacctccgggccccggcggctggctaatgttttgtttgaaagatcggtggaactttttaagagagtatttaaaaaaaaaaaaaggaaaaaaaattcaccgggcaaccggggaagtattgtggccttggagtttgctaaatccaaatatgaaaatcaaaagctttagtattcctcatcttctcttctggaagatttgcgttagagtttttgttgggccttcaaaaagctgtgttcagagttaggagaatatatccaataaaagatggtttcgtctaccaattggggaagtttcaccctctccctatctgaagaaaaaaatcaaaaacaaatgtccccggatctttcgatgcaagtcctggaggcagggagatcactgcctgcctggcccacgctgctgggacggctcgtcctccctgctttttgtttttcaaacctcctgcttctcccaccttgggaaggagaaatgtgaaacccggcagcggccgacctaggcggtcttgtggcccggagccggcccggcccgaaaaccatagacctggttgtactgtagcttgttgtttgggggaccaaattttctagagagaactagagcacttttgttgtgtttttttgttttgtttttgttttttgccttgtcgattcccgaataaattttgtgttccttcttttaa

SEQ ID NO: 948 - DNA, 353 bp, Homo sapiens
tttctctctcttcctttactgagatccccaaataacgaattaagatccatgcttccgcgcaggcacacaggcgtttgacctggttgcagtctggttctcccaggcggattagggggtggtcggctttcactcttctgatgggatagatgacttccgacttctgataggatagatccgccggttcttgcgggctgctgctcagctgagactagaccccgcacccagccctcactgccccccccccgtctatctcggggcctggccagcaatgtggcggcaggtccaggccggctggtgggccaggagcggttttgcgccacgggaatgagcctgcaggcctctcacttcagccc

SEQ ID NO: 949 - DNA, 143 bp, Homo sapiens
aagaaaagaaaaaaaaaaaaaaaaaaaaaaagaaaaaacaaaaaaaaaaaaaaaaaaaaaaaaaaaaaaataaaaaaaaaaaaaaaaaaaaagagaaacaaaaaaaaaaaaatagaaaaaaaaaaaaaaaaacaaaaaaggag

SEQ ID NO: 950 - DNA, 148 bp, Homo sapiens
  misc_feature (136): n equals a,t,g, or c
aaaaaaaaaaaaaaaaaaaaaaaaaaaaaaaaaaaaaaaaaaaaaaaaaaaaaaaaaaaaaaaaaaaaaaaaaaaaaaaaaaaaaaaaaaaaaaaaaaaaaaaaaaaaaaaaaaaaaaaaaaaaaaaaaaaaaaanaaaaaaaaaaaa

SEQ ID NO: 951 - DNA, 116 bp, Homo sapiens
aaaaaaaataaaaaaaaaaaaaaaaataaaaaaaaaaaaaaaaaacaaaaaaaaaaaaaaaaaaaaaaaaaaaaaaaaaaacaacacaaaaaaaaaaaaaaaccaaaaacaaacag

SEQ ID NO: 952 - DNA, 96 bp, Homo sapiens
cccgaaaaaaaaaaaaaaaaaaaaaaaaaaaaaaaaaaaaattaaaaaaaaaaaaaaaaaacaaacaaaattaaaaaaaaaataaaaaaaaaaaat

SEQ ID NO: 953 - DNA, 126 bp, Homo sapiens
  misc_feature (9): n equals a,t,g, or c
  misc_feature (10): n equals a,t,g, or c
  misc_feature (14): n equals a,t,g, or c
  misc_feature (20): n equals a,t,g, or c
  misc_feature (95): n equals a,t,g, or c
  misc_feature (107): n equals a,t,g, or c
  misc_feature (108): n equals a,t,g, or c
  misc_feature (110): n equals a,t,g, or c
  misc_feature (118): n equals a,t,g, or c
gccaaaaannaaanaaaaanaaaaaaaaaaaaaaaaaaaaaaaaaaaaaaaaaaaaaaaaaaaaaaaaaaaaaaaaaaaaaaaaaaaaaaaaaanaaaaaaaaaaannanaaaaaaanaaaaaaaa

SEQ ID NO: 954 - DNA, 151 bp, Homo sapiens
aaaaaaaaaaaaaaaaaaaagaaaaaaaaaaaaaaaaaaaaaaaaaaaaaaaaaaaacaaaaaaaacaaaaaaaaaaaaaaaaaaaaaaataaataaaaaaaaaagagaaaaaaataaaaataaagaaataaataaaaaaaaaaaaaaaaa

SEQ ID NO: 955 - DNA, 130 bp, Homo sapiens
aaaaaaaaaaaaaaaaacaaaaagaaaaaaaaaaaaaaaaaaaaaaaaaaaaaaaaaaaaaagaaaaaataaaaaaaaaaaaataaaaaaaaaaaaaaaaaaacaagaaagacaaaaaaaaataaaaaga

SEQ ID NO: 956 - DNA, 165 bp, Homo sapiens
gggggggttggtttaacaaaaaaaaaaaaaaaaaaaaaaaaaaaaaaaaaaaaaaaaaaaaaaaaaaaaaaaaaaaaaaaaaaaaaaaaaaaaaaaaaaaaaaaaaaaaaaaaaaaaaaaaaaaaaaaaaaaaaaaaaaaaaaaaaaaaaaaaaaaaaaataaaa

SEQ ID NO: 957 - DNA, 724 bp, Homo sapiens
ttttgcgtttcttttctttgggggggtgggaaacaggaaagggataaagaatccaattagtgttaacaaatcttatcaacatgtctccaaatttagactctgccacacatgtggctggaaagcagtggccacccaaaacaactctctaaaaagtaaaacatgtagctctgaaaagtcagataaagcaaacccatgccctcaagaccccgcaggaatgccattagggggcaggaggcctgaatttggctgtaggaatttagagaatttggaggttctcttccattcaaattttttcctccaagtggtatatactttaccataattttcatcataagccaaaagtctgacattagcctgaaggactgtgtgaccattaaagttagtaaattaaactaacttattctttacaaaagagtaaatcattcttttatccaaagagtgactgaggtctacactgcactcagcactgaggggagcgccacggtggaagggaacacacgtgggtcacagtcaccgcacacaaggtacttatggtctagctggggatgcaacacagccacacgccaaccagggagtgaacaagacagcatgatacatagtaaaataatgttccaggttaaccaggaaagaagcaagtgcgactgtgcctttggttactatgtcttttccaactgatgacatgaactatactgtatatttttctgaataaaaatatttttcttta

SEQ ID NO: 958 - DNA, 118 bp, Homo sapiens
ggattacatactgttgccaactgaaggttggaataaacttgtcagctggtacacattgatggaaggtcaagagccaatagcacgaaaggtactgtttaataataactgactataaata

SEQ ID NO: 959 - DNA, 195 bp, Homo sapiens
  misc_feature (3): n equals a,t,g, or c
  misc_feature (30): n equals a,t,g, or c
  misc_feature (32): n equals a,t,g, or c
  misc_feature (37): n equals a,t,g, or c
gcncccaatacgcaaaccgcctctccccgngngttgnccaattcattaatgcagctggcacgacaggtttcccgactggaaagcgggcagtgagcgcaacgcaattaatgtgagttagctcactcattaggcaccccaggctttacactttatgcttccggctcgtatgttgtgtggaattgtgaacggataaca

SEQ ID NO: 960 - DNA, 187 bp, Homo sapiens
tacctgacactgtggcctagggctctggtatattcctcagccactttctcattaatgtgtaacaacttgggagcctttgtgtgtcaccagatcaactgagcactctttgttgtctgaaatatcatctggaggtatatttataagctgctttcaaagacaggcccacaaataatgaccacattacatg

SEQ ID NO: 961 - DNA, 501 bp, Homo sapiens
cgccttccctcagtccctctcatctcgtttagattccatctcccgtgatccagtgacatgaacttgggaagaggctgcactgggcatggtcctgggaagggctcacacccagacatggatggagacggggtgagggtcctgtggtgtcagtgctgttgggcagcagggattgctcaggggccgcatctggatgcactgtcagcgctgtgtaaaccatgataacagaagctgcccatgaagtcaggtgcacacgtacctgctcactggcatagaaaagaacactaaggggaaagctttcctgcctcattggtaactgcatttgaagccgaacaagtgagtcattgggtttccgactccaaactcgtaaagactgggaacagaatggaaagtttagacactgacattggagatagatgattctttcattccatcatccattttaatgtatgacgtcaacataaatgtgtaacaagattcattaaactagtctcagaagctcta

SEQ ID NO: 962 - DNA, 501 bp, Homo sapiens
cgccttccctcagtccctctcatctcgtttagattccatctcccgtgatccagtgacatgaacttgggaagaggctgcactgggcatggtcctgggaagggctcacacccagacatggatggagacggggtgagggtcctgtggtgtcagtgctgttgggcagcagggattgctcaggggccgcatctggatgcactgtcagcgctgtgtaaaccatgataacagaagctgcccatgaagtcaggtgcacacgtacctgctcactggcatagaaaagaacactaaggggaaagctttcctgcctcattggtaactgcatttgaagccgaacaagtgagtcattggatttccgactccaaactcgtaaagactgggaacagaatggaaagtttagacactgacattggagatagatgattctttcattccatcatccattttaatgtatgacgtcaacataaatgtgtaacaagattcattaaactagtctcagaagctcta

SEQ ID NO: 963 - DNA, 452 bp, Homo sapiens
catcccttttcctgtccagccttccaccctccctcacatcttagtggggagccactgttctcaattctgtgggaagggtcagtgcaagtcctgtagaaatgtattttgacatcattatgagatttaaacaaattcctcagtgaatgtttggttgtgatatgttaacctgcaagttttgaacattgacatgttttcgtgttaggaaacaggagctcacttttctacatccttgttggagcatgctgggaatgaagacaggtggatcttttaactttctcacttctataaagaatgccacacagggtgctgcatggtggctcacacctgtaatcccagcacttgtggaagccaaggtgggaggatcatttgagccccagagattgaggctgcagtgagccatgatagtgccactgcacttcagcctgagtgatagaacaagaccttgtctcaaa

SEQ ID NO: 964 - DNA, 309 bp, Homo sapiens
aaccctggcttcatattagagtgcctaggcgttttgcagaaacatctcttgtgcccccttgacgtattttcatttcagtgttttagagcccagctgagtaatatttaaagttgactctattctgtagccagcatagtaccaatcactgtcttttgtttctgaaggctgagctcagcctgggatccacagagaggtgaggggggctgtgttctgcatggggtttggtcagggctgggtctgtgtcctaaaggggagctcagtccagcccagctccccactgctgcagtgtgtgtgggcttctccaggagg

SEQ ID NO: 965 - DNA, 309 bp, Homo sapiens; identical to SEQ ID NO: 964

SEQ ID NO: 966 - DNA, 452 bp, Homo sapiens; identical to SEQ ID NO: 963

SEQ ID NO: 967 - DNA, 1246 bp, Homo sapiens
tatttttcagttcagtttaacaagtttccactatcactgtggatttatgaatttctccttgcaattatgtcagtttttactttatacaaatagaggttgttattaagtgtctacaagtattgctatttttctcagttaatttttttcttattatttagttaccttttatcccaaataatgctttttgccttaaatcaattttatgtgtaaaattgactatagttacatcagctttattttggtatttgcctgctataatttttccatccttttgttttcaacattttggtatctttttaatagtatacagttggattttttttattttatacaggttgataatttctgcttctttttaaaaactagtttagtccattagtatttattgtaattaaaaatagatttagaagagaaaagatttgaacagatttgggacaccaaggaagatatatggatggaataaaagcacttggaaagacgctcaacatcctaagtcattagagaaatacacactaaaaccacaatgagataccactgtgtacctattggaatagcaacaacaaacctgttaatgccaagtgctggtgaagatatgaagacaatgaaacttgcatacattgttggtgagaatgcaaaatggtacaaccactttgggaaacagtttgggagtttcttataaagttaaatatatacttgccacatgactcaccaatctcactcctgtgtatttacccaagagacatgaaaacttatgtttacaaaacctttatatgaatctgtatagcagctttatttataatctcaaatgtctggaaacaaacattcttccattggtgaatgaataaacaaatcgtggaacatctttcaatgaaatattactcagcaataaaaaaggaatggagtatcgataggcacaacaaggaagaatttaaaatgcattgtgctaagagaaataagccagcctccaaggggtacatacaaattataaaattacattcatagaccttctaaaaatggcaaaactgtaggtctggagaacatcattggttgctagggaatggtgttggggaaaagaattgaccacaaagatatagcatgaggaaatttttgggagtgatgtatctgttttgtttcttagttgtggtgtgattacataactgtatgcatttatcaaaactcatataactgtacaccaaaagagtagattttactgtttataaattgaaaataaagtttttaaaagaaa

SEQ ID NO: 968 - DNA, 1246 bp, Homo sapiens; identical to SEQ ID NO: 967

SEQ ID NO: 969 - DNA, 2256 bp, Homo sapiens
tcctggctgcttcaaatcatcatgcaaaaagtattcacgggttcagaagattggtgaagacaatgagaaatcgacctgaggagcaaaacaaaggcatcagctcttacaccaaaagagttaacgctgtaaccaaaggtatagttttgttttttattttaggagaactgactggtaaatgaagaaatggaccaaattttgtgtaaacgattagaaagatgaacaaagtattgccctttgactggttttcttcttcatcctgagaaagatacattctcttgcagctcttcattcattggtgacaagcccccaccccgggactttactaatgagcttgttaaagaggtgccaaagaacatattcctcctttctttattctttctccaccaaaaccctctacttcagaattttttcaggatatttttcagcccaaggtcagaagaatgtgttaatattttaaataaaatatctggacatctacagccactgtgtaaatagaactgcctaatgttgagagtggtttttagcattaggtttagcaagggggagatccgtgggttgtgcgtcagctttgggtgaattttgtttctaccctgtcacggggaaagttcgggttgagtccaggagtgcacactgctgctgccacccaatgcgctacatatcacttttttttgttttgttttgttttgtttttaaaagatcattttatcttaaaaaggaaagctgatccaagtaaacacgaaagtatttgacacaccccacagattttacatgtgtgtaaatgtttcactttaaaatctctatgacagatacacaggaaacatgagatggtttctgctaatgagtggcccttgagtacacacttagatgctgtctgccctgtaaatttggatctggtgccccagggcagtcaactcttctagcacaggctgaaaacacgtgtgtgtcaactgaggttcacaccacttggggaatgagcctgttttctttccaggtcaggccctggtgtgagatcaattttagggctcctaattggagcacagaaatgtatttggtcaaatttcattgaaggtgatttcttcctttttctgttgtactttatggaaaaaccaagatggaacctgaaagttaatgtatccttgcttttagcaagagactcagtttcttataactagtcctaaggacatatgccgcaattgagtaattttacttttaccctatgaaaataacatggtgctgcactataatatactctcggaatcagtgtgttagttacagctatacagtgaagggggataactgtttctaaatttctttaaggtgatgccaaaaaatggattaaaaaatctgatcagatttaatgttaccagatttagtgcattatttaatgctattggatcttttggataattcttggcttaatttcttagctacttgaaggttaatttgcaagacttttaaaaccttagaaaagttttaaggttgcaaagttatcaacactggggcagagggtggagaggccaatgcgggtagaaggaggcagttatgtttatattgaaggtgaaatttttctttcatttagaatggaaaacatccccaaatgtatcattataaactagtcagccttgactacacaaaattgacctttaagttgcttgagaaaaacacaatgcaaatcgttcagaagggtcaacatcctttggtgctaaaatcttgtgtatgttttcagaatggctttttctgtatgttatagaataatcactaaaggaaaggtagttgaatttaaagtcatgaagcaagactctttaattcagttattttaaacaagaattaaaaccccaaacatccttggcaggctttgaagcacacagaattttctagtatttcttattaaatacaccaataataaacatatacttagtttacctgatgagtttagacataattctatataatgttcgcttatattcatttattaactagcaacacttgtgcaagaacaaggtattctgcttgaaaacactgatttttaagttcctgttgcccgattgtaaagaaaatcatctgacacagaagcctggattttgctctcctaacactggtgttttccttgagcctctaattcaaataaaacaaactgatacaccttacagccttattcatctgtgtctggataactcacttttcatctattgaataagaaaaagtgtttaaacttaataaaataaaaaattgtgcaccaattactacagatccttg

SEQ ID NO: 970 - DNA, 9404 bp, Homo sapiens
gacttcctcttcagcggtcacacggttacgctgacactgacttatttgttcatcaaagaatgtaagtaatagcccattcccactgaactgatagctgtagtgggagggatccctgggccctgaaattgataggagcccttattctcttgggattgataagctgtgaaagagacggatgtgtgtgtatatatgtatgtgaatgtgaatgtgtgtgtgtgcgtgtgtgtctgtatatatataaaatataaaatttcaactagtcatatgtgatttgaaccctgaaggcttaaaacctggccctggcttctctctagcatttaacatgcctctaaaacatctcccttcttggttagtacttcttaaggtatgaaaagctatcttaatattggaattaattgttaattttattgcaaaaaggattggtacattctaaagacagatgtaatgacctttgaattatttgtaggacacttccattctagcattccaaataattcggttaatgtgttcccctttttaaaacatttccaagtcccactttattctaatttcatcatcatctagcactttctgtgctttcataggagtcttcatggaccattttgccaataccgattattttcttctcaataagaaatgtggtggcaagaaataaaaatctctttctatatttgtatgcttagttcacattatacaaaatccttgggttttctagtaggttttatggccaaaatcatgtcttgttctttgtagggttgtactgttttagctgcccagtaggtctcatttttatatatttcggaggatttgtatatttaggcctattacctcaaaatctttttgaagtaataatgcttcttccttcatgtttgcaaagctggtcagtattacccttcatatttagttccaagttacctcatggcagtattttttggaggtttatcttaatccttttcactgggcatatttaaaagggggtctttcagcagagagcagcagaaggcagcttcccctcccctgtcctccttgttcttccctcctctcttggccctttgttcatccaaatagatttatcctaattggtggtgtggaagtcaagggttatcttcagtggtgcagaagtgaattattgcccctttgattacctggggtatttaagttctgctttgagggtaagatgacaagagttgaggttctctgtagtagatgaagtcaagtcttttttgtgagaattgtagcgtctttttgttgcttcctttgtaaattctacatacagacctgcagtagggagaatagtgggatacatgtggggtcttcatacttgacttaaaagctttttccttatttctgttctcacactcttgtggtggtggagtgggtcctggatctgtctctgcaccatcatcagaggatggtctcttccttaaatttagtcactccatttctaatattgagttattggttctggggggttggatggaaggatatatgttgctttggttctaactctaattttcccaaggaaagttccatgagtatgctatgtaagatcagtcattttctagtgtagatgtacatttgagtttaggatcttctctataatctgaggatcataaaaaaattacagaagaagatggggatgagggtggaggtgggggaagaggtgcatttcagagtgaaggcactgtaggtttaaagtaataaaaacacccccaggaaacttagattcagttttctaaaataactgaaaaccaactgatattaactgtattagtctgttttcacactgttgataaagacataaccaagactgggtaatttataaagaaaaagtggtttagtggactcacagttccacgtggctgaggaggcctcacaatcatggtggaaggcaaaaggcatgttttacatggcagcagacgagaaaatgagaacgaagcaaaaggggtttccccttataaaaccatcagctcttgtgagacttatttcactaccacaagaacagtatgggggaaaccacccccatattcagttatttcccaccaggtccctcccacagcacatgagaattatgggagctacaattcaagatgagatttgggtggggacactgccaaacctcataaacaataatagcaaatagacataatactctgtcccaggcactattctagggccttgatgtaaattaactcatttgatccttacaaccaccctctgaggaatgcagtattttttcccatttttcagatgagtaaacttaagcttagagaaagtgacttggccacagtgcagagccatcattttgagaagcaggtattcatgttgaaggaggctgaatccaggggttttgcttttaatttcttggctctgtttagaactttggaaattcaagctggctaactctatcgtattgccaaggaatagtctacttatctataagcagggacattgctcattattgtacattctttcatctcagagcaacagcaaggcaacttgtgattgattttatactttaatgaaggcctctcagtatgtagagacattttttcccaagacatgattttgactagaggtttctaaaattgtgtacatttatatatagtgtgcaaggaataccattctgctttctccaatatttgattagaaatagagggacaaatctgtaatacttaacacaaactcagtttatagtcagttctgtatgtaagcagagcattccatgtttgtgtctgtttttttctatgcaattaggaaaaacatttatcttctaaattataccatatgttcttgttctgagtaagcagtggttccagtggtttctttgaaaagtctgcttctagaattagatgtatcatttatatatatatttttttactttcccgccttttgatcagtttgggctcttttccttgtttgctctgttgtcatgagtagatttaaatttagttgtgagagcacatgaagatgtggcaccaggaccatttcggggttagcaagggagggcttcatacagtcgtgcaaatattataattggggggtaggttcatgataaaattagcctggagaaatcagactagctgttagtgccaatcatctggctagtagagaacagttttttggttttttgttttttcacctggccaccctaccaagtctctattatttaatgagccctagggctagaattccacacagacagtgatgttagctattatttgtgtcatcatctagctcattgttatccctatgggatgaatgagaagaggattaccattttgccattctatttcaaaacagcttctattcaatcttttctttgggtcagccagtgttctcagttaatgagtggtgggcccaatgtggtagcataacaggaaatacatttttatgagaaagcactgctggggtttccagccgttcctaaaacctcacttgcaattccgtgagtagtaaaaagaagattcaggccacctctggacctacttcaactttgcttcttgtgaataaacaaatgcaaaatagttctagtttgcctaaacattttgaacttctaaggtaaatcccagatgacctgtaagttgggaagcagggttgctaagagaccttgggggtgggaggcgggtagggtctgaggtgctgggaaacgcatatttagtgagacctccagatttctcaatgttcattcaatttttaatgtcctgagtctaacacaacagttatggggactggatctggctcctaagactgcaagagtaaggcctctcccattaaaattctgagattccatgagttttcttccagaacttagtggcagaatgaagtaactgacaagtaataaggaatatatccaaaattagaaaatcagactttcaaatgccatacaggtttattttcttactgtgtgccatttgggaccaacagagcaacggctagttttaccaagagattatatttgaatgatacctgatttggtatttcatttaaagttctggaaatgggctgggcgcagtggcccatgcctataatcccagcactttgggaggctgaggcaggcaggtcacctgaggtcaggagttcaagaccagcctggccaacatggtgaaaccccatctctactaataatacaaaattagccaggcataatggcgcacccctgtaatcccagctactcgggaggctaaaggaggagaatcgcttgaacccaggggacagaggttgcagtgagccaagatcgtgccattgaactccagcatgggcgacaagagcgaaactccctctcaaaaaataaataaataaatataaagttctggaaatggatccttttgctattcaatcatctttctacatgtgaatgtaaatatcactataaatgtaaacatagttaaatatgaaatcaatttcagtttattggattaacttttattgtgagctaatacagctttaaaataaaacagatcaccaagctgctagagatgaactctggtttcagttatatttgtcattaacacttgtgtgagaaggggaggaccatcatgtttaaaccagtgagtgccacagttgtctcttacagctagtaagtagaatgaacttttaagtggctttaccaggaaggctgagtccataagtgaatggttaggaaccctaacctttacagagggaatgttttatagtttctattggcaataacagtgtaaaattgctgagaatcaaaatattgctagccacaatgccattccttctgacccccttaccctacacatacccctggagaaataatataaatttaaaacctgaaattactcctgctttcccatttccccccttattttcatagaccaccaccttttcttttgatccctactatctttctttccagtgggaaagtggctcctttatgtgagccagtatgcagcaattccagcaaacctaataagaaacaattctgttctttcttactaaacagcttattcacgtgggtaaggcctagaatgtctagtgttaccagcttccccagtgaatgactattacgcccgctgccagggagcccctctgcctccctcctacctgagcagatcctgggcagttcatagtgactcagtttaggttatcagttttatccttctggtgacttcctgatcctgggttattctacttaaggtcgttaggacagactgtaatcattacattcatctctgggaatcttattaactctgtaatttttctactgtccagattcgcctcgtcacttctggtggtatcatttaatctgctggctgctgagtgctgccgggatcatctgcattcttgtagcacacgaacactacactatcgatgtgatcattgcttattatatcacaacacgactgttttggtggtaccattcaatggccaatgaaaaggtgagagcagtgaagatgcttggataatttcttttctttgaatgcagtggacccttttcatgtcgtggggttttagatagcctaatggggataaccgatgttgccacattcacttaaacatatatccattactgctttttaaaataaagcaaagaacttcacaaatataaatgccatttatggataaaaatgccataaagttatggagcacagtgcattgctaattcaggtaacttaaactagaatgaaaaaatatatgtactaaattaaaatttaggaaccttctctgtaaaagcattgtagtgcagctgggtaagacataatcctgccttcaacttaaattaattttaaggagaaggtaacagctattttttttaattttttttttttttgagacagagtcttgttctattgcccaagctggagtacagtggtgcaatcttggcttactgcaacctccaccttccaagttcaagcgattcttgtgcctcagcctcccaaatagctgggattacaggtgcacgacaccacgcctggctaatttttattttgtatttttagtagagacagggtttcaccatgttggccaggctggccttgaactcctgacctcaggtgatcctcccacctcggcctcccaaagtgccaggattataggcgtgaaccaccgtgcccagccgatagcagctattgtttaaaatcacacaaaataaatagcttatgaatgactggatttggtatatcctctggtgataatggtgctctctggcttcccttctgattcttcctcatttgctactgctgcttccttgtttccagatgccttttctttcttctcccattgaaacttaaagagctagctcaaatgccacctcttccaggaagctgtctctaactcttgctctcttcctctggtccgaaggcagaattattcctcccagtctctcttttctcctagtcttggtatgtgtccttggtgtaatagagttggtctgtgtaccatgacttacttatctttgaatagacttgccatattgtcaatttggagaatttgtgagcaattgaaatattacatttccaaaggatctacgtccaactcttggtgtccactaataaatgctctttctttggattactttatttctctttgtagctctgtttcctattttgtagtctcccatttccatcttccttcttacacttccatctagttgactactgacaccactgaaccaaaattttcatctttcctcttaaatgtgttcaacttctgagctcttctttcactctttgacttgcttggcccctagatttgatcactcacacatcctgaaaattattcctcctgaataattctgaaatccattcccagagtctccattcttactggaattgcaggcagaagaaattgcatgagccacaaaggaaagaaagacacctaggtgtgttaggggagcggagtcatggtagagttagggaaaggacatgaaaatcattactgccatgtgattctgaattctgttttccctaggttacagtgaatgacaatttaagaaaataattgggatgcaaattgagaaagatatgtctcatttaaatttttttctaccatttacagaacttgaaggtctcttcacagactaatttcttatctcgagcatggtggttccccatcttttatttttttgagaaaaatgtacaaggctcaattccttgctgcttctcctggccgctgtcttggcctcctggctgcttcaaatcatcatgcaaaaagtattcacgggttcagaagattggtgaagacaatgagaaatcgacctgaggagcaaaacaaaggcatcagctcttacaccaaaagagttaacgctgtaaccaaaggtatagttttgttttttattttaggagaactgactggtaaatgaagaaatggaccaaattttgtgtaaacgattagaaagatgaacaaagtattgccctttgactggttttcttcttcatcctgagaaagatacattctcttgcagctcttcattcattggtgacaagcccccaccccgggactttactaatgagcttgttaaagaggtgccaaagaacatattcctcctttctttattctttctccaccaaaaccctctacttcagaattttttcaggatatttttcagcccaaggtcagaagaatgtgttaatattttaaataaaatatctggacatctacagccactgtgtaaatagaactgcctaatgttgagagtggtttttagcattaggtttagcaagggggagatccgtgggttgtgcgtcagctttgggtgaattttgtttctaccctgtcacggggaaagttcgggttgagtccaggagtgcacactgctgctgccacccaatgcgctacatatcacttttttttgttttgttttgttttgtttttaaaagatcattttatcttaaaaaggaaagctgatccaagtaaacacgaaagtatttgacacaccccacagattttacatgtgtgtaaatgtttcactttaaaatctctatgacagatacacaggaaacatgagatggtttctgctaatgagtggcccttgagtacacacttagatgctgtctgccctgtaaatttggatctggtgccccagggcagtcaactcttctagcacaggctgaaaacacgtgtgtgtcaactgaggttcacaccacttggggaatgagcctgttttctttccaggtcaggccctggtgtgagatcaattttagggctcctaattggagcacagaaatgtatttggtcaaatttcattgaaggtgatttcttcctttttctgttgtactttatggaaaaaccaagatggaacctgaaagttaatgtatccttgcttttagcaagagactcagtttcttataactagtcctaaggacatatgccgcaattgagtaattttacttttaccctatgaaaataacatggtgctgcactataatatactctcggaatcagtgtgttagttacagctatacagtgaagggggataactgtttctaaatttctttaaggtgatgccaaaaaatggattaaaaaatctgatcagatttaatgttaccagatttagtgcattatttaatgctattggatcttttggataattcttggcttaatttcttagctacttgaaggttaatttgcaagacttttaaaaccttagaaaagttttaaggttgcaaagttatcaacactggggcagagggtggagaggccaatgcgggtagaaggaggcagttatgtttatattgaaggtgaaatttttctttcatttagaatggaaaacatccccaaatgtatcattataaactagtcagccttgactacacaaaattgacctttaagttgcttgagaaaaacacaatgcaaatcgttcagaagggtcaacatcctttggtgctaaaatcttgtgtatgttttcagaatggctttttctgtatgttatagaataatcactaaaggaaaggtagttgaatttaaagtcatgaagcaagactctttaattcagttattttaaacaagaattaaaaccccaaacatccttggcaggctttgaagcacacagaattttctagtatttcttattaaatacaccaataataaacatatacttagtttacctgatgagtttagacataattctatataatgttcgcttatattcatttattaactagcaacacttgtgcaagaacaaggtattctgcttgaaaacactgatttttaagttcctgttgcccgattgtaaagaaaatcatctgacacagaagcctggattttgctctcctaacactggtgttttccttgagcctctaattcaaataaaacaaactgatacaccttacagccttattcatctgtgtctggataactcacttttcatctattgaataagaaaaagtgtttaaacttaataaaataaaaaattgtgcaccaattactacagatccttg

SEQ ID NO: 971 - DNA, 2086 bp, Homo sapiens
gtaaaacccatttacatgtaggaaagaaaagttgagcttcaacccaatgtgccactttgatataaaacaagtatgatatatatataaactgaagatataaaacaagtatgatcttgcctttgaaatcataaatgtttggggtacctgttctttgccagttaagatacatatcttattatctttgtttttttcaagtctatgctcctgtttgaagcttttcctgtaatttaggttgtctgtgaaatacctataacatataattcctatagagtatgccacattttttttctaactcatttcaaatgaaattctctcagattctagtttttgagcttgtccactagatctgaaaataaagcatcctttcctgagtccacttgaactaattgtgaatttgttacttaatttactggcatcttgggaaacaagttttgctgtggcaggaaggctgttttgagagtgagcgttgagtctactctggtttgtggatgacattgcattagggttatttcctgtattaccagtgcccccttgtggcaatatactttatgacttggaatgcaaacaccacttttaaaagcctgttttcaagtttttgaaaggcatttgttttctgttgtttgccaataatctgaaagtatcatgtgaaaggaattattttaaaagcattttaaacctttcccaaaggtaaaatgtgctcagattataggcacttgtaattctaaccttgtatccatttgatcaaagaaaatttgtagaacatttttacctctcatgatcacaatcattagtgtctccctttataacgacctatgttttgtttactttgaaacaccaaatttgttgtcttggttttttttacatgacagaactcatgcagtttcttttttagttgaaagttcacatcttgccccttgaatagtttgaacatttctttcttaattcttttttgtttttgttttgcactgtaaaactgatgaaaactttaagccaatcttaatgcactagcctctgtagtgtaaggaagtgtgagaaggagtttcttaatgagtttacacgtttaaatcaagcatattataagttatatgccatgtgttgaaggcttttctatttatatatataaagatttttagtatttgtttttagtgtccttgtgttgcaataatttaactcctttgactcagttgctgaaaatatttcttctattaagaagtgctcttgacttcaacacccaaacactgaaaatcatgtcaatgttacccaaagataagtttttatacagatacacaccttataagttctgatttattttcttactcattatgctgtgttctaaataaatcatgaatgagaagagtgctttattgtgaaattatttaaaactgtcctttaaaagaaaaagaggaaacgatgaacaaaaactaatctaattgccaagttagaattcattatttaatttacctcctatgcaatgattaatgctgcaaaatgtatggttatgttaccgtatattcacaaaagaaatattattacaaggtttcagaggtagccaattgcattcttttggaaatttactgtactgtttcaatgtgttaagtgccttgttgtaaagtaaaattttaagtctagattcattattttcctgacatatatttttcattatgatatctactgtatgctattgtgatagttttatgaaatgcttacattttaatcaaatatgtaaatttcagaagctcttttttcctacccaccagtaccttaatcattggtttatcacattggattcaaattcaggttccttttttgataaagaggaaatttgttttccatgcttgtgattttgtgtttgtaaacatttcaggaggaatttaggagtgtaactatagtttatacttctataatgttgtcttacatttacatttttaagtgcctaattgttaaaactgatttatgtttctcttctaaagaggatatgtgtacttggtttctaatctctttggttttgctttttaaatatgcaagagcctatactttgtaattacctaataaaccacagtgacatcaacagtcttttcaaaaataa

SEQ ID NO: 972 - DNA, 426 bp, Homo sapiens
ataagtgttggccccattattataaaaggattatgtgaaatgatttagctttgcaaacctatttttccacatacaagaatgtttggctgggagagcaacattcccttccctgagaaagctttctagggcgagctatccctcatcttggccataggtggccaaacacttacctccttcttcttcttttttttttttttctgagatgagttttgctcttattgcccaggctagagtgcaatggcgcaatcttggctcaccgcaacctccacctcccaggttcaagtgattctcctgcctcagcctcccaagtagctgggattacaggcatgtgccaccatacctggctaattttgttttttccttttttttttttagtagagacagggtttctccatattggtcagattgatcttgaactcctgacct

SEQ ID NO: 973 - DNA, 797 bp, Homo sapiens
tgctctcttcctctggtccgaaggcagaattattcctcccagtctctcttttctcctagtcttggtatgtgtccttggtgtaatagagttggtctgtgtaccatgacttacttatctttgaatagacttgccatattgtcaatttggagaatttgtgagcaattgaaatattacatttccaaaggatctacgtccaactcttggtgtccactaataaatgctctttctttggattactttatttctctttgtagctctgtttcctattttgtagtctcccatttccatcttccttcttacacttccatctagttgactactgacaccactgaaccaaaattttcatctttcctcttaaatgtgttcaacttctgagctcttctttcactctttgacttgcttggcccctagatttgatcactcacacatcctgaaaattattcctcctgaataattctgaaatccattcccagagtctccattcttactggaattgcaggcagaagaaattgcatgagccacaaaggaaagaaagacacctaggtgtgttaggggagcggagtcatggtagagttagggaaaggacatgaaaatcattactgccatgtgattctgaattctgttttccctaggttacagtgaatgacaatttaagaaaataattgggatgcaaattgagaaagatatgtctcatttaaatttttttctaccatttacagaacttgaaggtctcttcacagactaatttcttatctcgagcatggtggttccccatcttttatttttttgagaaaaat

SEQ ID NO: 974 - DNA, 2087 bp, Homo sapiens
gtaaaacccatttacatgtaggaaagaaaagttgagcttcaacccaatgtgccactttgatataaaacaagtatgatatatatataaactgaagatataaaacaagtatgatcttgcctttgaaatcataaatgtttggggtacctgttctttgccagttaagatacatatcttattatctttgtttttttcaagtctatgctcctgtttgaagcttttcctgtaatttaggttgtctgtgaaatacctataacatataattcctatagagtatgccacattttttttctaactcatttcaaatgaaattctctcagattctagtttttgagcttgtccactagatctgaaaataaagcatcctttcctgagtccacttgaactaattgtgaatttgttacttaatttactggcatcttgggaaacaagttttgctgtggcaggaaggctgttttgagagtgagcgttgagtctactctggtttgtggatgacattgcattagggttatttcctgtattaccagtgcccccttgtggcaatatactttatgacttggaatgcaaacaccacttttaaaagcctgttttcaagtttttgaaaggcatttgttttctgttgtttgccaataatctgaaagtatcatgtgaaaggaattattttaaaagcattttaaacctttcccaaaggtaaaatgtgctcagattataggcacttgtaattctaaccttgtatccatttgatcaaagaaaatttgtagaacatttttacctctcatgatcacaatcattagtgtctccctttataacgacctatgttttgtttactttgaaacaccaaatttgttgtcttggttttttttacatgacagaactcatgcagtttcttttttagttgaaagttcacatcttgccccttgaatagtttgaacatttctttcttaattcttttttgtttttgttttgcactgtaaaactgatgaaaactttaagccaatcttaatgcactagcctctgtagtgtaaggaagtgtgagaaggagtttcttaatgagtttacacgtttaaatcaagcatattataagttatatgccatgtgttgaaggcttttctatttatatatataaagatttttagtatttgtttttagtgtccttgtgttgcaataatttaactcctttgactcagttgctgaaaatatttcttctattaagaagtgctcttgacttcaacacccaaacactgaaaatcatgtcaatgttacccaaagataagtttttatacagatacacaccttataagttctgatttattttcttactcattatgctgtgttctaaataaatcatgaatgagaagagtgctttattgtgaaattatttaaaactgtcctttaaaagaaaaagaggaaacgatgaacaaaaactaatctaattgccaagttagaattcattatttaatttacctcctatgcaatgattaatgctgcaaaatgtatggttatgttaccgtatattcacaaaagaaatattattacaaggtttcagaggtagccaattgcattcttttggaaatttactgtactgtttcaatgtgttaagtgccttgttgtaaagtaaaattttaagtctagattcattattttcctgacatatatttttcattatgatatctactgtatgctattgtgatagttttatgaaatgcttacattttaatcaaatatgtaaatttcagaagctcttttttcctacccaccagtaccttaatcattggtttatcacattggattcaaattcaggttccttttttgataaagaggaaatttgttttccatgcttgtgattttgtgtttgtaaacatttcaggaggaatttaggagtgtaactatagtttatacttctataatgttgtcttacatttacatttttaagtgcctaattgttaaaactgatttatgtttctcttctaaagaggatatgtgtacttggtttctaatctctttggttttgctttttaaaaaatgcaagagcctatactttgtatttacctaataaaccacagtgacatcaacagtcttttcaaaattaa

SEQ ID NO: 975 - DNA, 2207 bp, Homo sapiens
ctttgtaagcaaatattctaaggagaatcaatcttattttttaattgaactttttgaaattagggatactataataactgataaagatgaatttctgtgtttctaaagaatctaatttcaattactaccattaacatataaatgtgcttccaaaatccaagcaggtccatacaatttagagatttgaacactgttatcatgctttaattcagtcattcattaaaatattatctattcacttatttgatgattccaaacatttgatattgtattgtgtttttataattatttgaaatctgttcaccaatgctttgtaatggttttattaattgtgtagccattgctacttagatagtaacccactgagcaaaggcagtcatttattttcatccttgaagtaggggaagaaaattattaatttattagttctactttttcctgcattgcttattttgtaaacattttactatgaataatctgttctctttcactgtattaaaaggagaagaaaatgaacatttgagaatggaaaaaagtaataatatacaaataatctagtgctataaaatgcattatagtaagacacttttggtgtcttcgagtgcactatgttggaataaattttatacttgttgcttagtaaatctcagtcatacgtttggtttgaagctgtttttttttttaatttgaagtttaattttaaaagtgccacattgtaaaagttaccgttaaatactatgtagtataaaaaaccaacccaagctattgttaatgctctgaatgtttttctttgaaaatttaagtttagagaagaaattccttcatttttctcccctttgctaaaagaaagaaaatctataatatgtaagtctatgaatctttaaataactgaaggaattttagcagtactttgtataataaaaatattttttaaactataacttgccttagagcatggggtttcagaaagttttgacgaaaaactcatcttcattaaagagtctggataacttcatcagatggtaatttaatatgtcatgaaggggacactcaacattgggtcatctaccgtctaaataaatacggatttcatggtggcatttgaagcacattttgcaaacattatgatgttctattgtcttgctgaattctttattataacactacctcaagacaaatgatagactgttggtaaggtaaattgggttttcaatgtcaggaacaaataaaattttgcaaatagaagtcatcaaataattcaacaggaagaccatactggacacagatgttgtcagttacttctggacaatgtggtaacatggatatttcagtcactggtaacaatgtcagggttaacacccaatgaattatttgaaacaatttgggttgcaaaatttgaaattaattagtctattttgagattgattttctacgtgggccaattttatgtccattacctaaagccacaatctcccgctctaaggagttaaaggatgaaaacacccaactgctacactggaatggcagactggatattcaagcattttggcatttaatgcctgctaaatttttgtccgattatatatagatttgatgtatattattacccagtaaattcttcttgggaattttgtatacattatggaatattaggataagtttttgtaggtcagaagaatttcaagtagtttttagacaaaacatatccatgagtgtgaaaaaagctgtgttgacgaatagattacatttcacatttaccagcaagtcagtaaaaaatagtgcttatttacatagtcaatataatttaatgttctaaaaataatatcttcgatctgcccaatatttaatgtatcatttgagatttttaaaaatgcatccgctccattatgtaaacattaagatatgcctatgtttctttaactatacagcctctttacaataaatttcttgatttttgtgcacaggatagtattgcaacctgctatttagcctttggtgccttagaattattataaatatttaacaatatgtacataatgtaaatactgccaagagatcagtaaggccaaatattttctctattcactttttattgctcttgctttctattgctactaaagcctcttttatccagctttgtaatagttccaacattgtagcgaatgtaaatgtttactttcaataaatctgaacttgttcaacaagta

SEQ ID NO: 976 - DNA, 1950 bp, Homo sapiens
aacatttgatattgtattgtgtttttataattatttgaaatctgttcaccgtgctttgtaatggttttattaattgtgtagccattgctacttagatagtaacccactgagcaaaggcagtcatttattttcatccttgaagtaggggaagtaaaattaataatttattagttctactttttcctagcattgacttattttgtaaacattttattatgaataatctgttctctttcactgtattaaaaggagaagaaaatgaacatttgagaatggaaaaaagtaataatatacaaataatctagtgctataaaatgcattatagtaagacacttttggtgtcttcgagtgcactatgttggaataaattttatacttgttgcttagtaaatctcagtcatacgttggttgaagctgtttttttttttaatttgaagtttaattttaaaagtgccacattgtaaaagttaccgttaaatactatgtagtataaaaaaccaacccaagctatgttaatgctctgaatgtttttctttgaaaatttaagtttagagaagaaattccttcatttttctccccttgctaaaagaaagaaaatctataatatgtaagtctatgaatctttaaataactgaaggaattttagcagtactttgtataataaaaatattttttaaactataacttgccttagagcatggggtttcagaaagttttgacgaaaaactcatcttcattaaagagtctggataacttcatcagatggtaatttaatatgtcatgaaggggacactcaacattgggtcatctaccgtctaaataaatacggatttcatggtggcatttgaagcacattttgcaaacattatgatgttctattgtcttgctgaattctttattataacactacctcaagacaaatgatagactgttggtaaggtaaattgggttttcaatgtcaggaacaaataaaattttgcaaatagaagtcatcaaataattcaacaggaagaccatactggacacagatgttgtcagttacttctggacaatgtggtaacatggatatttcagtcactggtaacaatgtcagggttaacacccaatgaattatttgaaacaatttgggttgcaaaatttgaaattaattagtctattttgagattgattttctacgtgggccaattttatgtccattacctaaagccacaatctcccgctctaaggagttaaaggatgaaaacacccaactgctacactggaatggcagactggatattcaagcattttggcatttaatgcctgctaaatttttgtccgattatatatagatttgatgtatattattacccagtaaattcttcttgggaattttgtatacattatggaatattaggataagtttttgtaggtcagaagaatttcaagtagtttttagacaaaacatatccatgagtgtgaaaaaagctgtgttgacgaatagattacatttcacatttaccagcaagtcagtaaaaaatagtgcttatttacatagtcaatataatttaatgttctaaaaataatatcttcgatctgcccaatatttaatgtatcatttgagatttttaaaaatgcagccgctccattatgtaaacattaagatatgcctatgtttctttaactatacagcctctttacaataaatttcttgatttttgtgcacaggatagtattgcaacctgctatttagcctttggtgccttagaattattataaatatttaacaatatgtacataatgtaaatactgccaagagatcagtaaggccaaatattttctctattcactttttattgctcttgctttctattgctactaaagcctcttttatccagctttgtaatagttccaacattgtagcgaatgtaaatgtttactttcaataaatctgaacttgttcaacaagta

SEQ ID NO: 977 - DNA, 21619 bp, Homo sapiens
caggcaccatatctggaaatcaagaagcaaatggataaacaggacccccttgctcatcccttactgcaatggtataaaattctagttttcctcttaatgaaaacagcatccttttctactgcttgatttaaggaaaaaaaccaaacaaacaaaagtaaacctgtcttacaagccctgcaatgctatagttctacaagcttatgagacctggtgattttacaaccttagagtccttaatgactctcactttaattaaaacttatacatcacaaggggaagagaatgctgtcacatgcactaccagggataaatagtgcatttgacagcagtttgcctatagttttaaaagatgtgattaactagcttatgtggcaaaagcattttggttcatttaattttctagttcagtgaggactaagtgatcaaactcagtgtttcaacctttattattgaaatctttctaatctaaaataaatgttttatattttgctcccttaacaaggcagtataaatatgattaactcttaactctctgcttgctcagtgcagaagatgcacagtttcagagtgagcctggtgagggatgtagtgttaccccagcatgaattctagaaggagggctagactgtgaagaggagagaagtcaccttgctgtgatgcccatttcaaataatttgccctcttctacttctaataatttcctctcttgtttctcatttgcaaaatgaagacactagtttctactcaacatcccttataagggttttatacacatgtctctttgaattaactttgaaaactccaactccgtgagatttaccatacagtaatacaaatgtaaggcttataagagattgatatgaatgagcacttataccatgctacgaccaggaagttttaaaaaaatatgtaaaggtgggcagatgcaaaagaatctggcttcctcaagattctgattacttaactttcacttcattaaaattttatagtacacatttaatttagtctaacaagattataacaaaaattaggtatagaagccttccttctttgtatctgttatgatctgttactaaattctgaaacaattaagtaaaataacactaaatttccattgtaacctttaaatttttctcattgttatattcagattgaaggtaaaaattgcatatatctagttgctttctttttttccttgtagtcagatggttaacttttaattcttgtgatcatttccttcagcttgttagtcactcttctttcaagatgaagagagtctaccaaaacttattattttgtgtgcttatagagcagttcctttcagatacttcaatttaatttttttcaactgcagagtctacgtatgttggattttgtatgtaaaccattgtatatatatcagctcaaagagatcctcaaatatttaaagaaaaaaaatcttcataagaacttatccttaatttaagcaatgtaagagaggaataaaagaagcagatccatgactcactgctcttatttgtatttggattatcattatttgaaagtacattcagaaatgttcaaatgttcattttgctgatacttgaggttatgcttattaaaaactatgtcttaagttttagggaacaacttcctagtgtgttttctcagattaaaatattaccttttttgttacataagctctttaaattgtttcaggaaacaaacctaaattatgcgactaaatgaaattatttccaagtttagtttatggcacagcaaaaataagttttaatcggttgccaactaagaaaaagaactttaaatatatttggcatgtatttgtgactaatggatcattttaatttcagggttatatcaagtaatagatcacatattgtgaaactgccagttaacagggtaagttgttttttttttttttacatatgcatacagaaatgggaggagtacttatcagttgggagaacctaccttgtaatttttagccagactctccaagaattgaagtaaacccaggttaaatataattctttagtttgaaatagccattgctcactagctccaaacctttccaagataacaaattcaaattcagtctgctgtcctgactttttaagtgaataaaaacatcaatatgaaatcatttagttattccacaagcaattgaaaaatattatatggagattaaccagaaggaagttaatgtgctttataatcgttgtcagtttcatgttggcacatttccacttttctacagctgagaagctattgacctcagacaacttatttatcagcctagtaagcttaaaaaataataatttgtaaaaagctaatagactctggatttcagttctgatcatcacctaagatctgtacctaaaaatctcatttttgccatctgtgaatctctaaatgtgagattcctatgcattatattcctgcataactatattcctaagagaaagggaaacacttagaagatgttttcaagctattaatccaaaagattctgctttcatttctttccatgaccaaggaggagactatatttgaatgtaggcaaaaattctcaattttataaatatatgcaaataaagcataataataatttttgcagttttataaacttttcttttctgcttagcaaactccagaatatttccccaattgaatagctagtatatacttagggactcaataataaaaatgttaaaagaaatgtaattaagaaggcagatctgcttaaacatgattgcatactgtattccaaagctaaatataaatggctttggattgtctgtttcctattcctttcccatttgcccaaagaattgttcttcatatttgcaattccatgtgacttatcacttgcgtagagttttaaaaacattatacaaattagcttgctaatgtggttagtggaaaattactatagtttgaaagtgggtaattcttaaaccaataaaatttgaaattgtcatcagcctgaatatatgttaagttttacatgtttttgtttgtctttatcttaaatggcagcaattgaagtttatgcatactccacatcagttccttcttctcagcagtccaccagccaaagaatccaattttagagctgctaaaaaactctttggaagcacctttgcatttcagtgagtaaggcttaatgttaatgggggtgtgctcccattaacattttccagaaatgtatggggaagatatcactgtctttcagtaaatgatcattcagtagatggtcattcaacagatggtcatgtagtcaactacataatacttgatttggcaatccagaaccttcagaaggcaccatgacttattatgttttgaccactttgaagataattaattttctggttttgctttttcctttccgtctgtttttttagtggctcacacattgaaaactggcactccatcctgaggaatggtctggttgttgcttctaatacacgattgcaggtagattttctgaatgctttcacaagacttcattcttcttcagaattgagattcagtaagcaaccctgttgttaggtttaacttgcaaaagaggaagcatgtgagtaagacattatatggaatttctagtaggcatactagaactgaagcagaactgatctatacacaatgatgtaaacacaaaatggatcacacaatgaaaagaaaaagaaaggatgggtgcagtggctcacacctgtaaccccagcactttgggaagctgaggcgggcagatcgcttgaggccaggagtttgagaccagcctggccaacatggcaaaaccctgtctctattaaaaatacaaattatatatatatatatatatttatccaggcgtggtagcacatgcctacaattgaagctaattgggagaataatttgaacccgggaggtgaaggtgaaggtggcagtgagctgagatcacaccactgtacctcagcctgggtgacagcaagactgtctcaacaacaaaaaaagaaaaaaaaagaaaagaaaagagagtttaattccctctgagaaaacagtaaaacaaatcacactttttacttaagtagaaaaacattatcatgcacaaagtaaaatcatacaggcattctgttaattcaatgtacatttctagagcactgggcctcaatatgaatgcttttagagaataaaatgtagaaataagtgaagattgcatgctagagagccatctgatacctgcttttccgcctccaggacagtacttggtgttagcaggatatcatggcagtcatcttcatctttatttatgcctttcatcctgcacatttcacttcactctcctgcagctgaattttttttcatctgacagcataaggacataaggaaatgagatgcttaacccagtcacttgagctagatctcatattatgatgacattttagatgattcaattaaatgttaaatgtgtttagtattcaattcatactaatagtgtgtgagggcccagaacacagagataataagaaagaaatttagttgatctgagtatagtttcagttaatgaaacttatgtaacctgaaaaatgtaacaggataagaacaggatgacagatagtattattaatgaaaatctgagcaggacgctttgtttatacactaacatataaatcctaatcagaatgcgttactgtgtctttcggaccaagtttagtttctgaaattttagatccattaaaataaaggcctactagtgtactttataataaatgattgtctttattaatggtaggatggaaaacatttatcaagaatatttttcctctagataccatttttctaagcacaaggatattagtactgttttcaaattagaccttggaatagaagctctgtcatttttttgtaagactgaatgttctgacatgaaactgattgctttgtcaaatattatcatttaaaccatgaacagacctctctctctctcccactcttcccatcttagctccatggtgcaatgtatggaagtggaatctatcttagtccaatgtcaagcatatcatttggttactcaggtaattcctgtatttcatttctaaagtcacatttattaggttttaattttcttattgtttatactctattcacagctttctattgtgccttattagatatatttttattaaatttgtttgctaaatgtcaaaagcaaaaacaaagcccattttcaagatgaatttataatactctccctagtgtacaagatggaatatatgtttcatcaatttaaaaaaatatttaatattccttacatttattccttccacaaatgaatattgagactataatatatgcaaagcactatgtagggcactgagaagtacacatacataatatctttaagtgtaattctatatcatgctaatttcttatctttgtaatattattcataaagaagctttgaacattgtggaaacattagagtagaaaaacaccctcaaaatcatctttcttgttaacaactttttgtaaatttggtgagattgtgggaaaaaatactttggaaaaaattgaaaacttgtgctgtgcaggagcctggtgagttcaaaatgtagaaagaatgatcaccaaattgttagcattacttatccttggtggaattggtgatgttttcttctttgcacttaaaaaatttttggaatattttacaatgatcagcatgatttatataacaactaacctattctggtttaaatataaaataattatgctcattgtataaattcaagctacacagaatttttgaagtagcagatgaaaattttctctcctttactacagcttcagtgttctgtgtatgttccttcacacttttaagtggttttatatacatataactgcatatgtaattagttttgcttgtgtgctcatgcgtgtgtgtgtgtgtgtgtgtgtgtgtgattatgtgatcacgttacacgttttaggagatgtcattcacatggtgcctgaatggtgagtcttaatatcctcatgttataggaaaggatatttagagaggtctgataaccaggtgaacattaaagagaactacctaatttatttaccaaagttcatgttcttccaaccataacaagttgtttctcaatgataggaaacttggaacgcttaaaaccagatttataattagaaatactaaaagaaatcagcaacattgataaatggtaaaatgctgatggaaagaaaactttaaaaaatgagaaggttgcatgttaacaaaaaaagaaaaattagaaatatatgaaaaattaaaacataattattcaagtaactattgctgttcaacaaacaccttaaccttagggcaaaataacagcttcattacgctcatagattctttgggtcaggaatctaggatgggacctggctaagtgattctttagcccctcaaagtatccactgaatgccgctcagctgatggatgggctgcgctggcaggcctgagacagcctgactcatattcaagagttggggaattggactccatctcttgttagcaaagaaatactgtttcagtgatctctgaaaatacaatatgccaaaataacacaaagaaaataaataccaggaagtgtaagataccgtagagataggaaatggagttacaaagaagaaatctattaaaatcagactctaaatcttgctaaaacagtacaaaataaaaagctaagaaaccagctgaaataaataaatacattctcagcataaagaaaaaacacagcaaatcatcaagtactgtaattttctgttttttatactggtatatagactccttcaatgggtacatggaaagaattgtggaagggtttacaaaccatgtgaatggatgtaaaaatttgtgttatatgtgctttttttctggagagggagcacttacctttcctcaaattcttgaagggctcttgatctaaaacaaatgtaagaatcactacagtaagatgacgtagcatctgtcgttgattttgagggctgaaagtgtaggggtaagagaacaggacagcttctctgcatatatatcctttgctttttgttcagaattggcatttgaaatccaaggccttctcctcaacctgtccccatccacccctccacctttttggaaggcctggaaaagttggataaatgtactttgcaaaatttgtaaacaggcttttccccttctcattaagccatttgctgaaacaactacaaaaatcaacacctatctcaacttctggtgtaacagtagatgaacactttctaataaagtgtagatacaaatctacctattctaaaacagatgtgtattttagttctgcttttctaaattattcacagtaagaaattatggcatttacagagtaagctaaaatttgtgaatattacagacaaaaaaacttacataatttgtcttaattagaagaaatgttaaattctgcatagaatttaagaacaaataacaacaaaagttcagttgtaatgtaaaaatatttttctgacattgttcacatttcccaccctttattttctccttctcctagccagatagtgggaatgaaagttaggttctaaaagccttttaaaatcaagttttaagaatttttaaattatattaattttatgcagaagaattttcgatccttgctttcaatgcaaaaaaataactttcccaggacttcccaaacccactgatcttccacctcaggggctaagggcacagccctttgttactgtctctagcctaatgtgatcaaacctttacctagaatggaactttgcatagtaggtcgattgtactttcagctgcatcagacagctttgtccctaaattattattttgccgatgttttcagggatgaacaagaaacagaaggtgtcagccaaggacgagccagcttcaagcagtaaaagcagcaatacatcacaggtgttgtagtgactttagtgactgcttatgattagtgaactgtggcctcatcagccagcagagcatggaaaaataggctttttaagtctgaaaaattatttaatgtggtcattacttataaaggaataaaactcactctgaaatgcagtaactgaattgcctctatacaataattaatcaacagatatttatttatctcccactataataccagagatactcctaggcagtagagtgtagtgatggccaaaagtagacacatattccgtctcttggagcctacatcctactgaggggtataaataaattaaatacatatttagatagatagaatgctagatattatgaagaaaaataaatcagggaaatgagacatttaatgctgtcaggtggaagagggatctgggatgaatgttaaatgggatggtcaggaaaggatactctgagaaggtgacatttgagtcaagacctacagatgatgagtgcgtgagccatgtgactctctaggagaaagaacattctgggcagagagtagaatgaccatcaatcccatgttgtttcagagaaaacaagtatattctgggaaaattaaaaaatcatctgataagtagtgtgactttaaatttaaaaaaagagagtatagctaatctaatatctgaaaaaaaaaaaaatcccagattttctacatgaaatgtttctgtaacctccgtgacctagtacatgatgctattaaaaaaatgggttggttttggagtaggtgatctgaaataattgattttgatgtttgaaaagatcaagcaaatttaattttgtttaccttgaaataaagaggccaagcttttagtaaaaataaatttgagttctaattctgtgttgtaagattattgaaccctaatttagcatttttcagttcacttatctcaagaataatttagtaatgatgatgtacagaaattaaaaataacttaatattaagagagtgcaaggaaattgatgctagtctagataggctttttttttttgacctggagccatcttagtgactattactttttaatgatgaacagcttttttcacaaagtgtttcattctgactctaagttttaattgtttttggaatttagtcacagaaaaaaggacagcaatcccaattcctgcaaagccgtaacttaaaatgcatagccttatgtgaaggtaagttgaaagttttacaaacctcatagtgttagttcctagctcatctataattaaaaatataagtatatttacagagtgcttacggtggaatagggaaagcattattccttatgatcatctcaaagggcacaaatgcaaaaacgggtaccgtagagatcataaaggttcaaaccaaattgcagaattggcaagaattcagagagtgatatattttatttctggcagatatttccagaatggtaattatatctttctgatcaagtaatgcttatctctttagttaatgtgctaccttcctcttaaagttggtatttgaatatatgatactatgaaaaatgtgaaagatgaaccaagcactgagaagataacctattaggtctttctgttcctgcactgaaattattatattattctgtactgaggacagaaaaattgatgggtgatttgcaagatgatatacttttctttgttcttgctttaaaatatgactgcctaaaaattcattttttcttcttgtgttaggagttttagtagctgctgtcaactgtcttttaagttttcaacacacggtagttatataggacatgaacttgctgtctacatagttcttaagtcaggacctatctgcttttggtaatacttagatgagtccctttttattgttataccagttgttattcaaattataaagttgttacatggtctttcactgtttttatctatatttcttcatagacaataaggctaaacaatttttatgtgttcattagtgcttgtatttttgctttagatttcaacgagaagagatatattaagtcggaatggactaggattcctttagaataaagtggttctttaattttattttccacttaacagtgatcacctcatctgacctgcacaaacatggagagatatgggttgtccccaatactgaccatgtctgcacacgattctttttcgtgtaagtggaaatgctcaaatttgtatattactgtctttgccacaaatgggttagtggtgactgaattatcgtttggtctctttagctgccaaaatataacaggtaattgagtttaacatcaactaatgtttttgttttattttcagtaagccattaaaaaaatctaaataatttttaaatgctgttaacttagaagagctcatgaaaaacacctgttaacttacaactaaaaaaaacaccatcttagtcaagcctggtggcccacacctgtaatcccaatactttgggaagccgaggcgggtggatcacctaaggtcaggagtttgagaccagcctggctaacatggtgaaacgctatctctactaaaaatacaaaaattagctgggcgcggtggtgcatgcctgtagtcccagctcctggggctgaggcaggagaatcgcttgaacccaagaggtggaggttgcagtgagccaagatagcaccacttactccagcctgggtgacagggagaatctgtctcaaaaagaaaaaaaaagaaaaaagaaaaacaccatctctgtctctctagccatctctctgtatgtatatatgtatacatgtgtttatacacctccatacacacatatacttttgttaattttaaaaatttagaactgggatgaagaatacaataatgaaaaggtctgtcctataaaagattgatctacattccatataatacaggctggcaatgcagtacatgtcaatgtggggtttttttttggcacagctgtatcataagagttgcattaaaatataaaagcattatttttcattcctaaataatgggtgcagtagaccagtctaattttcactctacccttggcttccaacccgtttcccatgctgttcccaccttatccatgatcttgtcacagaaaggatttcagggaagagttgagcatatctgttttgtactttatgtagtatatttaaaagaaactgaaaaatggaactgttaaggttgcttcggtatactgtatatcctgagtaccctgtgtattcagcattggatctgttggcttgttgacagactattcacagtgagacttacaagctgcctggttttcttttggatgatttgaaaactgtgattgttcttaccatagatatttgctgactatagatttctttcttaacagtgaggcagcagtgagtataggagaaggagcccgcttttgatcagatagtttgaatcctggctgaatagtaattagtaagatgatattgcctggttgtataacacgtctaagcttcatcggtaaaatgataataatatacctgtatcagtcagaatccaaacaagaaacagatgacccatgaaaaatatttttgggtcatccacaattagattatttacaagggtatgattataaggaaaccgcaagtccagtgtagtaacctggatctattagcaccagagctgttatacattcccaggtacaaaaggacacagacaggaagcagtcctgttgggaagccccattggccaaagcctgccagaagctagagaacaatgaagcttattgagaaagtccttacaggtcaggctcctggggcagaacgaaggcagagaaagactccaagaggatcctgggggctcctagagaagctaactgcacacagtacctataaagtttattatgaggattaatttagcacaatgcaggtcttggccactgaaaagcttattaaatatttttttctgtcttctttcttaactatcttgattgttatccactattagatgcttggccttgcaaaaagaagctttcagtcaccaagttatttcactgagaaatcttgagattttggccgaaaagtaactccagagtgctttccttagcctgtcatctaatcagttcatctactccttctgcatcttgctaaaattcaaattaattgagccaaataaacaaccttagatatttaaataggcagtaccatttttagtattatttcttttgaacttttagataaattatacataaagcctatctgtagggatgtacatgttgcggggggtgtttactggagaaaagaatttctgtatttcataagcaaaaattgaggttaaatcatgtgaataaaagagaagtacactcagatacttcctaaataatacaaggaaaaatttcgtattatcatattaagataattgtcattgctttatgaacacaaatgagatttcatcctttttgcaccctcaggagagaagagactcattaaggaaaattgataaattcaaaacacatcagaaggggaatctgtttcattaatatgcattctaattacaaccatcagtttctctataaaagatatgatcacagagttctattagtagtgagccaccctaatgtgtggtaacacctagaagaagaataaatcgatgagaatgaagataagacaaaaactcaatttctgttctttttattttaattttttgatacattatgtgatcctggatgttagaagctttgcctaatggctaggatatgagttaacatggttaccttttttaaaagtctattatcaggtaacaatattaaaaattaaaataactcccatgctaatctgattcccacagttgagatgataaaacagtcacatagtatgctaaacacatgttttccagcaagtaagcagcacagaatgagagaaaaattggagggaaattttagggaacaggctggtgcatcagaaaaaaaatggaagtaaaaatttaaaggaagatatcaattaaaaaaaaaagaagagaattagaagttcaaaaaatttttgttggaaaattccaaaatgaagaaacttaattaaatataagtgctccaggcaaaatgtaatagatcagatgttatgaacagatccaagccaattcctagtttctagaaactgtgagtaaagcttgattacatgactaaccttgaaacgcatgtgtactaggacattgagacccatatgtagaaattaggaagctattttcaaaagggctggagatgtgaatgtaggaatgaataaaatgctcacgttataactgtttgatgagtatttgccctcaaaaagggctaatacctcaaaatcaatatacaaataggaacccattatttaaattccctggccaacatctcaccttctccagtctgtgcagtaattttatacatcaaagagactcgaaacctgagctgtagttttccatttctttttccttgctcactacagtagtcatcaattcccaagtttatcttttcacaattttgtcccaatgcctttattcccatggatatattattctctcccctagaatatatcaaaaggtcattagttctccctgcttctactttcttcatcactcttagcctcctttgtgcaatgcaagacttattaaacattaccgttattacactagtgatatacctctttaatattcagaaattgaagataagccaaaaaaaggagaaaattttccatattatccccatttagagttaactaggattaatcttttggtgtacagcctacattcctatgcatataaaattctaagatcatactatttataccatattcatttccctaaagcagtgttttgattattcactgcccagacaggctgatagttaaatagaagcatggcattctccaacatatagagtcgcttctaccttacttcagttacatgcacaaaccactgattaagtgaaattcttgtccaagctgtttctttaaaacaacttggagttgtatttcccactattgtgcctttgttcagtcaatccaaatgatttggccttcttaccacctagaccattagcctatttttcaaggctcattcaaacatggtcttttccttggcaccttccctgacctcccagtctgaaatgattctgtcttttctctgaattctgctcaccctatgtttggacagctcaggctgccttgtcattttttttaatttgtagagatgaggtcttagctatgttactcaggtgggtctcaaactcctgggctcaagtgatcctcccaccaagttgtcaataatttcaaaagtttttatttatgaaatgttcttacatacctaagaaatttccaggcagctaagtttcatctaatttcctagtttctattatttttaaagcaaattggttaatttttcgttaaaattttagtaatctttttacactcctgggaatatgaataattcttgtctccttttagacgttttcatttttcattctaccaaaacccagtccaatgtatcatctccctagtggttatcattcatgttctatttctcttaaattctgttgctttccagacataaaagaactttactcttaaatcataaatagctgtgacatgttctgtataccctattgtaataaatactctaataccactagcaacttatgtatctaagccttgccagttgcccaaattaaatggatgtttgatttttcttgattattatatatgcatcaaatttaaaacacctgaatgcctttggtcaactttgtccttcaacccatgactgttgtgcttccttgtgggtttcctagacagtagaaaaatatgcattttatttaatacttttaagcatactgtctctctctttctttctctctctctctctctctctctctctagttctcactcttgccttcactcccacttttgctctctgctctctcttcctctgtgctctttcagtcttaaattattacagtttatgcaaagaatttaaatctcatatcttctccactaacttctaatgctttttaagtgtcagggtacatataatatttgggtagacaaacccttccatctgactgaaaagagtgatgggggagtgatggggcatgactggagaggaaatctgtatttgaatgatgaaggaactcgtattgccaataacttggattttgttctgtaagtgagatggaggccatttttctatcgcttttgcagggtggagaatagatcttgtaggacagatgatggggataagtgtagagacagagatcagttataatgttataacaacattctaggtcagtttttcttaccacaaaaagaaatgtgtttgacattgtgacttagaaaaaaataattctttctatctgtggtgaagtcaatgttctctattctattctattctgtttgattcgattcgattcaattctatcttaatcacttaaaatgctggtctggacaacctaaattaatttaaaaacccactagttatacacaatctgcaacttgaaaaccactcatttagatgaatgacaatggaggcctaaacaaaggtagagagaagatttaagaaaatggaaacaagatagcttggtgattagttgggtttaggcacaaagaagagccaagaatgactaaaggttttgtgttgctggatgacggtacatcaaattgagatatggagagcataaaaaatagcagtcctagggtcaaaaaataagggctttgaatatactgaatttgtgttatctgtagcaaagttatatagagagaaaaatttaaggatcggagatagagctttaggaatgagcatgtgggtgatagttaaaacttgaacggggctgaaatcattgattttgcatatcatgagagagagaaaactgaggtgtgattcatgtataaaaccatcattgaaatgagagtccaaggaagaggatgcaataaaagtcatggagaattaatctcagtaacagagcacttactgtcctgagaaaatatttgtaattgggctgtgtaccacatatcccattctttttcttagggtaatgtttcaccatgaggtgtcatttccatgtatatgtaagttgaaacttgctaagtatatctaaaacagcgataagaattagccaaatagacaaccttgggtcatttagttaagaatttagacttggtacaaatgcagttatcacttgatggttaagcagtggattacataaggagccaagttctctctgctgtatgtcatcttttcattttcctttattttgctatttcaggaaaagatagtggctagtattaatctttgagatgctgtgcttatatccctggttatctgttttcaagtaattaccacttttctaaagcttctgtcttgaagccatttttatgaagtaaaattaatttgtcacttgttcccctctgaatatgatcatgaaagcttgaaaattcattcttaagaaattcttattgcccaagtaactgtatttgagaaaaatgaattaccatctaaaatgtaactatttctttttaaagaacttagtaattgctgttctttagtattatattttcccttctactgataaagtaaacttagcaggcttgcattcttttatgaactgccagaataaataagaatatgttacagtcagactaaatagtgcgaccagtgataagaaaaaagggcagcactgattatggctgaataattattagaaggcaggcatggcaaagaagcagtggtagaaagtgaagtgtcttcagtcagaaaataaagaaatgatcgaagtaggagtagaattaagaagtccagaatcttagcaacataaagttgaagctgttatatttttttatagtagacttcgtagcagctgctatgggaaatgcctgcaaggccaaagacactgagaagcttcttgcaactcagacagtcttttatgcggggataaaaaaaaaaatggaagaaaggggaaaatttaggcatgacatagaatgggctgttctgtgtttcgcaatgagaacacattgttaaatacacctgaaaaacaaccgtataatttgcttttgattctcttgggctatattttaggtatcaaatagcatttctaagctgttttaaatgctgccatcttttaaaatgtttttatatttttatgttttgtatttcagctatgaagacggccaagtgggagatgcaaatattaatacacaagaaggaggcattcacaaagagatcctccgagtaattggtaatcaaactgctactggttaaaggaccaccatttaattaacatgattcgaaagccttcctcgggttcaaagctggattttgaactgaagaagattataaaattatttattgttattataaacaaaattaaccctttgaatactgattttttttcttagtatttctaagtatctcattaaatacctaaaatggtataagatttatcaattgtagggttatggaatctagtaataaaatttcaacagcacttaaactgaagtttgggttgctcatacaataaacagattgaaaaaactgttttgtgctgatatttttatactaaactctttaactggatatttggtattatataccgacattttaggttaccaaaatagaattgagaacattttataatggcatctaaatctatcagatactttgcaataagtatactgtttgcacattctgatgtgctatatcattagtagtatgggcattctaatgttttggaaggggtgttccctattctatttttcttcataaaaaaagaagtaggtcttagaagcagtgctttgccaaaaagtatgtaatatacacatctatacattcatgcatcaaaatgtgtggttgtgaatatatttgtgtatattcacacgtatgttttgacaagaaagatggcttagcttcacaattctatcctcgtttaatggaaagaagataatatttagtaagcaataaatttggacataaatcaagatatgagccagatttaccaccattcattcactgaaaatatttgcagacaatttttctgtttgtctgaagaaattcagcccttttaaaatgttatctaaaagtcataatttggggaacatacatggcctggtagaccgaatctatattcaaatgattatgtatttaaaagaaagacctcagaatttaaagaaaccatatatattttttatttactacaaaaaaattatacaattttatttatgccacaccagcatttttatatttgttcatctaatatctctgcttatttttttcatattgagaaagaacacaaactttgatgcttcttttatattaaaagaccacaaataagtttatagagaacagtaacaccagctctcagcatttccttttcaagagtcataatttcatcaaaatcatttcttattctttgagtcctagagttcttattcatcaagttttaattgacagtgtttattttcccacatgttgtctttggaataaggccattcatgaaagcagtttaattagtgagtctgccactctattcaaaccctgaatcaaggctctatctgattttaatttatgtaaaaaaaaataaaaatgtatagtcatttgcaagtataatgtgataactgctgtgtttatttcctttgtctggcataaaaggtgagaaaaaggtcatacatgttgttaagggtagcagtttaggaagtgttttctaataatttgttttgttttattgcaaataattgatatgccacttatttctgcaagaaaaataggcttgaagtggttgggatattaatcattttgatagtatctacttaaagcattgatctgttttgacttgtggctctgaaccctgggctaggctgagggataatagtagtggagtagggcaaagatataatatcctatccagtgttttgtgaccacttatttgaagattagtgtgggacatgaggaccttgctacttttttgccaagatgctgcaagtctcccaaatcacttcaactgtgtttttaaaacatgtttaagcaacagaattatttttttgaaattagtctatacgttagacagtctatacatgacaaacatgaagatctaatatcaagatttgggagacgggatcttggaactccacctgtttgaccactaggaccactgaggcacctccaataagctctgtagagtgcctccagcataattcaaaatccactgacctaatccattatggctttacttaacattggagtgatccgtaaagaatatagtattggagtctgaactggaacggtaactcgtaagactcaagaaagaccgtttaaggaaaattggcataatacaaactgttcctgttgacttaagaataacagtaggttcacctatctgaggaaattaagtagttgatagtttaatgctaggcatcttttatgataataaagtaagatgtcttcttatgacagttaattgagttgtatcatgatacagaatgacagattttgtttcaaacaattgcgtcagaacctttgtaagcaaatattctaaggagaatcaatcttattttttaattgaactttttaaaattagggatactataataactgataaagatgaatttctgtgtttctaaagaatctaatttcaattactaccattaacatataaatgtgcttccaaaatccaagcaggtccatacaatttagagatttgaacactgttatcatgctttaattcagtcattcattaaaatattatctattcacttatttgatgattccaaacatttgatattgtattgtgtttttataattatttgaaatctgttcaccagtgctttgtaatggttttattaattgtgtagccattgctacttagatagtaacccactgagcaaaggcagtcatttattttcatccttgaagtaggggaagaaaattattaatttattagttctactttttcctgcattgcttattttgtaaacattttattatgaataatctgttctctttcactgtattaaaaggagaagaaaatgaacatttgagaatggaaaaaagtaataatatacaaataatctagtgctataaaatgcattatagtaagacacttttggtgtcttcgagtgcactatgttggaataaattttatacttgttgcttagtaaatctcagtcatacgtttggtttgaagctgtttttttttttaatttgaagtttaattttaaaagtgccacattgtaaaagttaccgttaaatactatgtagtataaaaaaccaacccaagctattgttaatgctctgaatgtttttctttgaaaatttaagtttagagaagaaattccttcatttttctcccctttgctaaaagaaagaaaatctataatatgtaagtctatgaatctttaaataactgaaggaattttagcagtactttgtataataaaaatattttttaaactataacttgccttagagcatggggtttcagaaagttttgacgaaaaactcatcttcattaaagagtctggataacttcatcagatggtaatttaatatgtcatgaaggggacactcaacattgggtcatctaccgtctaaataaatacggatttcatggtggcatttgaagcacattttgcaaacattatgatgttctattgtcttgctgaattctttattataacactacctcaagacaaatgatagactgttggtaaggtaaattgggttttcaatgtcaggaacaaataaaattttgcaaatagaagtcatcaaataattcaacaggaagaccatactggacacagatgttgtcagttacttctggacaatgtggtaacatggatatttcagtcactggtaacaatgtcagggttaacacccaatgaattatttgaaacaatttgggttgcaaaatttgaaattaattagtctattttgagattgattttctacgtgggccaattttatgtccattacctaaagccacaatctcccgctctaaggagttaaaggatgaaaacacccaactgctacactggaatggcagactggatattcaagcattttggcatttaatgcctgctaaatttttgtccgattatatatagatttgatgtatattattacccagtaaattcttcttgggaattttgtatacattatggaatattaggataagtttttgtaggtcagaagaatttcaagtagtttttagacaaaacatatccatgagtgtgaaaaaagctgtgttgacgaatagattacatttcacatttaccagcaagtcagtaaaaaatagtgcttatttacatagtcaatataatttaatgttctaaaaataatatcttcgatctgcccaatatttaatgtatcatttgagatttttaaaaatgcagccgctccattatgtaaacattaagatatgcctatgtttctttaactatacagcctctttacaataaatttcttgatttttgtgcacaggatagtattgcaacctgctatttagcctttggtgccttagaattattataaatatttaacaatatgtacataatgtaaatactgccaagagatcagtaaggccaaatattttctctattcactttttattgctcttgctttctattgctactaaagcctcttttatccagctttgtaatagttccaacattgtagcgaatgtaaatgtttactttcaataaatctgaacttgttcaacaagta

SEQ ID NO: 978 - DNA, 458 bp, Homo sapiens
aagatataatatcctatccagtgttttgtgaccacttatttgaagattagtgtgggacatgaggaccttgctacttttttgccaagatgctgcaagtctcccaaatcacttcaactgtgtttttaaaacatgtttaagcaacagaattatttttttgaaattagtctatacgttagacagtctatacatgacaaacatgaagatctaatatcaagatttgggagacgggatcttggaactccacctgtttgaccactaggaccactgaggcacctccaataagctctgtagagtgcctccagcataattcaaaatccactgacctaatccattatggctttacttaacattggagtgatccgtaaagaatatagtattggagtctgaactggaacggtaactcgtaagactcaagaaagaccgtttaaggaaaattggcataatacaaactgttcctg

SEQ ID NO: 979 - DNA, 458 bp, Homo sapiens; identical to SEQ ID NO: 978

SEQ ID NO: 980 - DNA, 140 bp, Homo sapiens
ggacataggctagtgtaaatggaagccaggctaaaatcgggacaagtcttttaacacagtgtttgggcaagtcattttggtggcatgaaagttcacaattcccatcatcttgggagaaaagactagggcaattgttgttg

SEQ ID NO: 981 - DNA, 1879 bp, Homo sapiens
tgtggaaccctgtattattagttccagtcctggaggcctgcctcctgagtttcccagctagttgggacaggccccaatatcccttcttcctgtaacccaaacagtcatgaatttgctttggcaggtggatggagacttgggaacttccacctcacccactaagccaggcccaggctatggggcattgtggctaaccccaccaggtggatacttggtctgaggacgcatcttattctgggcctttagggagctaaggcagtgagaattggcaggaggactgctgtgaatgccttgtaggtcgggggattggagggggtcctctgctccctgtctctcaggatggcaatgtacctctcacccccagtgtcagctgaggtaggatccataatcagtaatattcctgcaacaaaatgttcctaagtggaatcaatgaagaccaaaatttatttgtataacaactctaaacctgctctgctctgctgtgtttacaatgtgctttgtgatcatccagcccagggagtcccagtctctggctgtctatctgctctaaggaagagagcccacagttctctatagtgccatagtctgtgatgaataaagttccagatttgaggtcaacccccgaccacccttaaagtgcttgttggtctcctgctttggtttgtcttcagcatccaactgatgcacatttgtcaagaacccactgaggctagaaaccccccaaacactcaaggtaccttgagaacatgtatcccaagacctgcaaagaccaaacacatggcctgtaactacttttcactttcaagccctggaacttgtctgtaccaaaaatctttctgaaccattcaccaaatctcttgtcaagggccagaataaattaagagattggcttttggttttcaattaggctttcaagtcctaagcccaacccctcctatcccacctaggcagaaatcacttcagatccttgcttcctagtttaatttcttctctgcctcagttataacatccataaaatggaaataataatacccacctcacacaggggttaggagtgtttttttgttggtttttttccagacagggtctcactctgtctcccaggctggagtgcagtggcacaatctcggctcactgtaccctccgcctcccaggttcaagcagttctcatgcctcagcctcccaagtagctgggattacaggtgcctgccaccacgcccggctaatttttgtattaatagagacagggtttcaccgtgttgggcaggctggtcctgaactcctgacctcaagtgatccacccgcctcggcctcccaaagtgctgggattacaggcgtgagccaccacacctggcctaggagttaagagtattaaatgttaagaacagaccaagtccatcaaacagctccacacccttgttccatgttctggattggggagttgtgggggtggaggtgtagaacttttaaaaagcttcttaaaataagttgctgtgaatacttcaggtatataaaaaaacattggttgacaataagccagtgttctgccattcttacctgcttatcaagacaaaacctgctcaagtccctgcccagctgcattccaagtgttttcaagtttggtggtaagacctgacctgaggcttcttataacctttactcagtgggaatatgcatacagttcactacagaaatatttgtgtttacttagaggaagtgccctggatctgggggcgggggggggcggggggaatgggtcttttctaaattgttaaaagcagttcatgccattattcttaataaacatttctaatatgctgtgaaagagtatattcgtttttttaatgcatatatccatttactcattgttcccatgaaa

SEQ ID NO: 982 - DNA, 483 bp, Homo sapiens
tggcacatcaacgagagggaggcttggagaatatttggttggtgggcgggcagggactgccagagggttaggtgtacattgaggcctgaggcctgctggaattgggtttccttaactggtctcttatcttagtcccattgttctgagaacataagcacctaatctcatggcgtgagctaatccctatcataaatagtggtaccagttcattccttcccctgaaatgatgggggttgggcagagatgcactgaactcatctttgtgtatgagggccatgagagaggcctggtttgaaaacaatgctaagagctcagattccaggatttatgtaggggctcttctacttcccaggtatttgacctcaggtgagtcatttaatttcagccttatgccattttacattttctgtggagggttaggttaattggcatataaagccactgagaagagttggcaaagctctcagtcacggggatttgatc

SEQ ID NO: 983 - DNA, 266 bp, Homo sapiens
ttctgtggcccaggctggagtactgtggcgcgatctgggctcactgcaagctccgcctcccgggttcatgccattctcctgcctcagcctccggagtagctgggactacaggagcccgccactacgcccggctatttttttgtattttttagtagagaggaggtttcaccgtgttagccaggatggtctcgatctcctggcctcgtgatccacccgcctcggcctcgcaaagtgctgggattacaggcgtgagccaccgcgcccgg

SEQ ID NO: 984 - DNA, 888 bp, Homo sapiens
ggagggcactgccctcctggaagagatgcattagatcggtaggcacagaatacctttacatgagaccatttagagaatgattaggggccaaaggtaaggggtggactgttaagccaacagggactcagagaaagcaagggtcagggtgaccagaaatagagaaaaaaaagcctcacagaggaagaggacctggacctgagccacagaggatgggtagaacttagaaggagggaatgagcccagtctgaatgatatgtctacaaagtatacaatatgcaatgatgattaactgaaaaattgggctggccatttgtgagatccatgaataaaagtagatcagaaagtcagtgtgagttttaaatatatatattttattataaaacgttaatcacataatatgtgaaatcactattgataaccttttctattggtcctagtgttttgctatttaagataatactgcatcaaatattcttagtgtagccatccatttacaagtgttattttcaagagcaaaatttatgcctttaaactgtgataattaaattaatactggtgagaactatcagatataccactgtgacagaacagatggcctagagacagtgatacctttaaaagttaaataattgctgagcgcggtggcttacgcctgtaatcccagcactttgggaggccgcggtgtgtggatcacggggtcaggagttcaagaccagcctggccaagatggtgaaaccccatctctactaaaaatacaggtgggcgcctataatcccagctactcaggaggctgaggcagagaattgcttgaacccaggaggcggaggttgcagtgagccaagatcgcgccactgcactccagcctaggtgacagcgagactccgtctc

SEQ ID NO: 985 - DNA, 296 bp, Homo sapiens
aagccaaaggtcacaagggaaaaaactgatagatttgtctgtgatattgagagatgtatgcacatatacatacaacagtcatagtaagacaccgttagacaaaagaaagtgatggtttggaaaaaaatttccaacataaaataaaactaatatttaattattagaaaataatagcaaacaacctggtagaagagagaacaaaaatattcatatacgataacgtgaccattgaatgtgtgaaggatgatatcacacaaattcaaatgaaattatcttactacatgttagattggccc

SEQ ID NO: 986 - DNA, 3923 bp, Homo sapiens
agaaggtcagtgtgcttgcttggagatcaggacgcaaaggtaagagcgcctcagtcgccacagaaatccggagtccctaacggaggggaaggctgtcgtagatagatattctcacaggaaaattgtatttgtgccaagagaactgcacgcaaccttgaagggagggggtaggtgtggaggaggggagggaggacgatactagagaacttgaaagaagcctccctttggagttgctaatgcggcgatggaagggtttggctctgaatcattggagggctgtggtttacgataggattttggcacggaggaaaacgtaggaagtgtatttttaaagtaattaaatcagtacggaaagccaaaatatttctgacagtgcccctttatctgttattgtcgcctttccttaattatttattttccttttcattagaacattttcaaatataacacagaaatagataacaacctgcgcgcagtagcaaacccctccctgcaccgcccccaccatcacgcacgcgcgcgcgcccgccgtggctctcaccagtcccgacgccaggggcgcacgcctgcgcaaacacagcacctcccgagccacgagggccgctcacacagcaaccccagcaccacgcgagcctgcccgcgcactaacacactggccttaatgccttgcgcccgttgcactcacgaccctcacttgcaaacacagcagaacccccactgcgccttttttttccgtgttcggggagttgcgccacaggactgggggcgtggccccagatttgacctcgcgcttccccactcgcgggaaccttagctcatttccgcctatcctatttccgcaggccacgtagacacttcctctcccagtggggggggaaaaaaaccacaaacccataatgcctccctgcaggaaaaaaaaaaaaaaggaaaaggaaaaaaaaaaaccctctggtcagaggaactctgggtcgtgaaataggccacgtgaacattctgccctgtagacttatgacccaacggctgtcacgcttttggagggcgggctaaaaaaaaaaacctaagagggcgaacgtcattggccggaactcgtactaacggaggaagaggattggtttgctgtagaccttaacagtgaagaagcaggttgctagcacccgcctttactgcggcgaagtgtcattgctgacgtgggggtggttgtccaatcatttgattatggaacattctaaaacttagacaagacgattgtgattggctgaagggcatacgccctcctccagggtgacgtgtctgcctatggatatcagttgccagagaaacctggctttactatggcggttggaggaacggcagtgatcacacgtcggctgctgggaagatctggattctcgtttcaggtttcggggtgggggtggggagaaagggtcgatgatttccttttttcgtcgggtatagacgggattacctagtgccttcacaatcggtcagagctggattcagattcctgctcgccaacgcccagcttgggcaaggctcctgttctttctgtgtctcggtttccatgtttgtaaaatggtgataataatagtatctacctcagagacgtgtactgtataatagtgcgtataaggcacgtaatgtgaagcctggcccctgaagatattagctattgttatggagataaataatacgcgtaatagaatgagaaaaattataaattatataaattcgctaattgtagtgccctttctgccatcaacttctttcctagaataaattaaagataaaatagatataccaatttttaccaatgaaataatttgttatttgggaattgcctcaaaatagcagagattgtaattttcctatattgaaaagttaaataaaaggtggggggggggggagtgcaagaaagaaagagatggagaacgagagcgagctggagatgaaccacatgcgatgagtaggccttgtttggatcctgaatcgaacacaccaactgtaaaaatatgtttaagacgcatcgggaaaattgggacacggattcgatatttgatgttttttagggaattgatgtcagtttttttaggcgtcacagtagtattgtgattatgttttcaaattgtccttttttgtagagacatacgaaaatatttacggattaaataatgtctgggattggcttctaaatacattaatgactaggatttgcttcaaaataatctcagcggtagggggaaatggggaggggtatagatgaaacaaaattggccctaaattaataatatttttttgctgagtgataggcagtgggttgcgtatattaatctgctttccttggtatacgtttaaatttttctataataaaatacagaagtcagatattccggtgagcttgaaaaagtcgggggtgggggggagcagtgggtggggttatagatgaaacaagatggccttcagttggtaattgttgaaagctggatgatggattcgtgtaggtttataatactatttcttttttatttcatccatttgaaattatatttaaggaaagttaaaaaacaaatttgtcagaaattatacaaatgtacaataaattaaatttgaaaatgtggccacaagaaaggaaaaagaaacacttgtacattatttatcagctttggtgtcctttgtgtgtgatgaaattgcattggctgatgtagaagaaagccatatctcatatctttttattttatgttctttcttgtccttttgtttgaccttctaggtcaccatcagaaaagctaagtttgctgtatagtgaggatcaggagatctgatcctgattgcagaaccttccctgattacagaatcttgggtaagtgcctcccttctgtcctcagttctcaaacaggataataccacataaccttcctaactgtccaggaatattttgaaaattaataagctcctatctgggaaagtagtctaaattctgagaagggaagggtggagctaagtccattgatagttccagtatagaaagtgcataagcaacagagggctttgtaatcttacatcccttgataaaagatactacagtcaatctcctgtagtagttccacagttccatagattacatttttccttggagcatcctatatgcagcatagtttagtggttaagagcaaatacttcctgaatttaaatcctggctctgccacttaactatgtgatcttgggcaagatatttactcactttatacctaagttcctcgtatatgaaacagaggtgataataatagttcctacttcataggattgttgagaggattacatgtaaagtaccaggacagtgcatggcacatgtaagtatttgctttaataataattatggttctgttagtcctgataatctcatgttttatctacacatttacacctacttctaaaagcagtggatatatttctttttggaattgtgtaaaaaaaaaataataattaataccgttggtttctctcctcattttccagaagcagcagttaccactagaactgaattccgaaattatgacttctggcttgtcttaacaatctagaaaggtttcaaatatattgatcatatttatttatgagggaatttccaggagctataattttagctagcagttcaaaccaaatttataaataagcaaatcttttcactgaatattcagtctgctaacagcttttgtatcattcctcctttgtctcagacttaaaaaaaaaaaatctattacatgtaatggaaatgtttcaagatccagaagagaaaattgatatgaatgtaactgatatggtatatgtgcatttaaaggtttattccaacaaaatgttactcacactcttttctgacacatgcatacacaaaagatgttagcatttgcagtctgattcccaaatgg

SEQ ID NO: 987 - DNA, 2714 bp, Homo sapiens
ccacaactagaagtttgtaaaaactatttttcttgtcgtggacacgtgaagagttctgtttgcaccctcagcctgggccaaataatcatctttatttaaaaacaaaacagaacaaacaaaccaaaaaaccctcaaaagcacaaagaggcagaaagcggctggtaaacctggttaaaagaccaaagttcagaaagtgcatgggagagggacgctgagctgcggacaccgttccggctgcagtacgtgttatggctgaggttacacttgggtgactcagggatgcaggcagatgaacattaaccacactaacagaggagaaagaagcccactggggctgtgcaaagtgtccaaggagcacagccccttttgccctgatcagatgtaacagcccctcgcttgagatctgactgggcaacatggcaaaaccttgtctctacaaaaagtcaaaatttagccaggcctgtggtcccagcttctcagggagctgaggtgggaggatcgcttgagcctgggaggtgagaggctgcagtgagccatgattgcatcactgcactccagactgggtatgatgctccagacagcaaaaccctgcctcacaaaaataaataaactaaaaagaagtaacagcccctcctggacttgttttattttttgagatggagtcttgctctgtcacccaggctggagtgcagtggtgcagtctcggctcactgcaacctctgccttctgggttcaagcaattctcctgcctcagcctcctgagtagctggcactacaggcacacgaaaccacatccaactattttttttttttttgtatatttagtagaaacagggtttcaccatgttggccaggctggtctcaaactcctgacctcaggtgatctgcccaccttggtctcccaaagtgctgggattacaggcgtgagccactgcgcctggccccctcctggacttttaggatgtgacttccttcccatccagcctttctgtctgagcactacccacccagctagactgacttggtaactggatctaagaaggaggcgatattgctgttttcgaggtcgatgggccaggggcctgggctaaggcacttagacaagcccctgccctgcccacctggtcaccaccattcacagtgatcactcatctgtggcaagaggtgggcagcggaggaagctgactagagatacctgatgtataactttttggaggtttttacaaaagcagatacagtggccagtggcatcaaagaaatggaatgagaacttgagcccaggcacccggagcaggtattttctgagccctcagctccctctacaggcctttcctgaccacagccagtccatctggggagccatgtctcagctctggcttgggtacagcagggagggctccagaggcccctgctgagcagggttgatcctaacactattcctctgtggcctatattgtcttttctcttttacctgttaatcatgttctcttttgcagcaagcaaattcctgaattttcgctcccttctagaagctcaagtgagggtctttaccagagacatacccagagatttgctgtaacgtcttcaggggaatccagaattcacttacagaggctatttctgccaagtggctttccctggagcagcccagagctctctttcaatcctaaggggatgtctgtctcactaatttccatcaagaaatctgttttcttggacaggcacagtggctcatgcctgcaatcgaagcattttgggaggctgaggtgggtggatcacctgaggtcaggagttcgagaccagcctggccaacatggtgaaaacccgtctctactgaaaatacaaaaaattagccgagcatggtggcgcatgcctgtaatcccagcagcttgggattgggaagcaggagaatcgcttgaacctgggaggcggtggttgcagtgagtcaaaattgcaccactgcactccagcctgggcaatagagtgagactccatctcaaaaaaaaaaaaaaaaaaaaagaaagcgacaaaaagaaatccattttcacaggaaaccaaaaatgagcattttggactcagtctgctaaatgattattcctttcctgaatacagattttggttttgagagtcaaacagggatcggcagcacagcgtgacttcggttttgattcagaaccattttactaggctcagaaaatcatgctttgtcgagttctgatggattccaagggaaatcacctatcaggtaaagctgtactttctctcaccaagaccctggaggtagcatttccacttccattctttgccgatggctcctgtgactgaacacagaagctgttttctgaaataagacgaaagcgtttgtggaagacccacagaataaaaatagagatacaggtgcttactttcaattcttttcttttaaatgtaaataatcgctccatgctccatgccgccacttacctcagctgaatacaaaacagctgaatccttttgaatcctttgtttttttctttttttgagacagggtcctgctgttgcccaggctggagtggcagtggtgccatcccagttcaatgaagcctcaaatccctgggctcaagggatcctcccgtctcagcctcctgagtagtagggactacaggcacgcaccaccacatcagctccgggcgacagaatgaggctccttttttaaaaaaaaaaaaaaaaaaaaa

SEQ ID NO: 988 - DNA, 908 bp, Homo sapiens
ctggccaacatggtgaaaacccgtctctactgaaaatacaaaaaattagccgagcatggtggcgcatgcctgtaatcccagcagcttgggattgggaagcaggagaatcgcttgaacctgggaggcggtggttgcagtgagtcaaaattgcaccactgcactccagcctgggcaatagagtgagactccatctcaaaaaaaaaaaaaaaaaaaagaaagcgacaaaaagaaatccattttcacaggaaaccaaaaatgagcattttggactcagtctgctaaatgattattcctttcctgatacagattttggttttgagagtcaaacagggatcggcagcacagcgtgacttcggttttgattcagaaccattttactaggctcagaaaatcatgctttgtcgagttctgatggattccaagggaaatcacctatcaggtaaagctgtactttctctcaccaagaccctggaggtagcatttccacttccattctttgccgatggctcctgtgactgaacacagaagctgttttctgaaataagacgaaagcgtttgtggaagacccacagaataaaaatagagatacaggtgcttactttcaattcttttcttttaaatgtaaataatcgctccatgctccatgccgccacttacctcagctgaatacaaaacagctgaatccttttgaatcctttgtttttttctttttttgagacagggtcctgctgttgcccaggctggagtggcagtggtgccatcccagttcaatgaagcctcaaatccctgggctcaagggatcctcccatctcagcctcctgagtagtagggactacaggcacgcaccaccacatcagctccgggcgacagaatgaggctcctttttaaaaaaaaaaaaaaaaaaaaaa

SEQ ID NO: 989 - DNA, 112 bp, Homo sapiens
tttgtttgagaccgagtttcactcttgttgcccaggctggagtgcaatggtgtggtcttggctcaccgcaacctccgcctcccaggttcaagagattctcctgcctcagcct

SEQ ID NO: 990 - DNA, 112 bp, Homo sapiens; identical to SEQ ID NO: 989

SEQ ID NO: 991 - DNA, 703 bp, Homo sapiens
agcctttctgtggacaactacccacgcagctagacttacttggtaactggatctaagaaggaggcgatattgctgttttcgaggtccgatggccaggggcctgggctaaggcacttagacaagcccctgccctgccacctggtcaccaccattcacagtgatcactcatctgtggcaagaggtgggcagcggaggaagctgactagagatacctgatgtataactttttggaggttttacaaaagcagatacagtggccagtggcatcaaagaaatggaatgagaacttgagcccaggcacccggagcaggtattttctgagccctcagctccctctacaggcctttcctgaccacagccagtccatctggggagccatgtctcagctctggcttgggtacagcagggaggctccagaggcccatgctgagcagggttgatcctaacactattcctctgtggcctatattgtcttttctcttttacctgttaatcatgttctcttttgcagcaagcaaattcctgaattttcgctcccttctagaagctcaagtgagggtctttaccagagacatacccagagatttgctgtaacgtcttcaggggaatccagaattcacttacagaggctatttctgccaagtggctttccctggagcagcccagagctctctttcaatcctaaggggatgtctgtctcact

SEQ ID NO: 992 - DNA, 7458 bp, Homo sapiens; identical to SEQ ID NO: 870

SEQ ID NO: 993 - DNA, 487 bp, Homo sapiens; identical to SEQ ID NO: 869

SEQ ID NO: 994 - DNA, 4625 bp, Homo sapiens
ccaggcgggccaggggtcgctgtactccctggaggccaccctggaggagccaccctgcaacgaccccatggtgtgccggctccccgtgtcaagaaaaccctggtgagtgatgaggctcttggggttccccgccccgaggccgagtaaagcagcagttggatgatgacgggtcaggtcaagacgcagggatctgaggtagctgctgccccaccttgagccacttcccaggccccgagggctggaaaccaagatgctatgaaggggaggatgccccggtgcaggccgtgcctcactgtccactgtgatggggtgattgccttaggggtggctctcatctgaggagcctccagctccatcttggccagatcttgctccccagatccagatccaggcccccagagcagcttcttcctctccctccagctctgcagcttccaagtcctggatgagctcggaagacacgtgctgctgcggaaggactgtggcccagtggacaccaaggttccaggtgctggggagcccaagtcagccttcactcagggctcagccatgatttcttctctgtcccaaaaccatccagacaacagaaacgagactttcagctcagtcatttccctgttgaatgaggatcccctgtcccaggtgaggagccctcagcttgaggagccctcagcttgaggagccagccgctgcctcatcacccttctcccttccctctggagtgggtttctctggtcagcctaaagactggtctgcctatccaggacttgcctgtgaagatggcttcaatcttcaagaactttgtcattacctataaccggacatatgagtcaaaggaaggtgaggacccagccttggctgtacctgttcctatcagaacaggactttccccccaacttggcaccttggtgtgtgggaggagaaagacaagaggcagtgtacctgttcaaggaccccataattcctgagctctccctaagccttcccagcctggcagccaccctgagtacctggccccttctcctaccttatcttcccgctcagaagccatgggtcttggccgggcgtggtggctcacctctgtaatcgcagtactttgggaggccgaggtgggcagattacctgaggtcaggagttcaagaccagcctggccaacatggtgaaaccccatctctactaaaaaaaaagtacaaaaattagccaggtgtggtggcgcacacctgtataccagctactcgggaggctgaggcaggaaaatcacttgaacctgggaggcggaggttgcagtgagcaaagattgtgccactgcactccagcatgggtgacaagcgaaaactctgtctcaaaaaaaaaaaaaagaagctctgcatctccatcactctggcagggtggaatggggcagaaggctggattttttgtgctggagagtccttgacaacatggcctttccccaccacctcttgtgggtggtgtcctttagaccccatttactgcttttgcacctgggaagtcatcacttcagtttggccctaaaagttgatcagacctcccactccatcacttgcatgtctggcccccacccctacctgctccccggggaaacccctgcctgctagccccaattgcccttccttttatctgcctggggtcgaacccctcctcttctgctccttggtcctcagaagcccggtggcgcctgtccgtctttgtcaataacatggtgcgagcacagaagatccaggccctggaccgtggcacagctcagtatggagtcaccaagttcagtgatctcacaggtagggatagtggccacagtcctcatggatccaggaagagacaggaccttgctcgcaaggcctctggtcaggtctggcttagaacactcttcctccccatgccctgcccacctttgcccgcagaggaggagttccgcactatctacctgaatactctcctgagaaaagagcctggcaacaagatgaagcaagccaagtctgtgggtgacctcgccccacctgaatgggactggaggagtaagggggctgtcacaaaagtcaaagaccaggttggacccctggaagtgagggtgggacatgggcactgcactggggctgacgaaggggcccggctctgactccaactccacccatctcttgtagggcatgtgtggctcctgctgggccttctcagtcacaggcaatgtggagggccagtggtttctcaaccaggggaccctgctctccctctctgaacagggtgagcatctcgctctactcctctgtccccagcctagcccctcaggagggcttcttgggaccagccttctgtctcctagagctcttggactgtgacaagatggacaaggcctgcatgggcggcttgccctccaatgcctactcggccataaagaatttgggtatgcattaatggggtcaggaggggcaaccggagccacttctccctgtacaagaagttacttcataatgggggggagacatgagcatgagagttacacagaactgggtccaggtcttaatgctgacccagccaggcgtggtggctcatgcctgtaattccaacactttgggaggccaacttgggaagatcacttaaggccagaagttcaggaccaggttgggcaacatagcaagaccccatctctacaaaaaattaaagacattagccaggcatggtggcttgcatctgtagtctcagctacttggggggctgaggcaggaggatcgcttgagcccaggaggttgaggctgtagtgaggcatgtttgtgccactgtactccagcctgggtgaaagactgctgggatgagctcttggtgaggagtcagaagttggagttgagttctgtctctgccacttttcttgctggctactggtccctcctccccatctctcccagcctcagatgtgtcatttctagaatgaagacattcttcagaggggatggcctgtggcctggggtggacgaggaatgtgaaacctcgcgtagagggcttagttcatttctggctgtgaatggcaaatgggagcctgcccttctctactcacccccaccgttccccaggagggctggagacagaggatgactacagctaccagggtcacatgcagtcctgcaacttctcagcagagaaggccaaggtctacatcaatgactccgtggagctgagccagaacgagcagagtgagtgaggggcagggtgaggtgaggtcaggtggggccggggcctgggtgcctactgatgccaccccttcccatctcagagctggcagcctggctggccaagagaggcccaatctccgtggccatcaatgcctttggcatgcaggtgaggccctagccccactgcacatgccccatctcttgttgacctccccgacctcttcttggagtcgatcccctactccttctccacctccagttttaccgccacgggatctcccgccctctccggcccctctgcagcccttggctcattgaccatgcggtgttgcttgtgggctacggcaaccgtgagttccgctgcctgtcctgcatccagccaggccacaggcaggggtgggatcacagcatctcaggtcctctagaggggaaatagggggaatgcctaggaaccctgtccttacccactgcctgggccatgaccagctgggcatcatctgtcctctctatggcagggaagctgagctgtgggagggtaaatattgatggcctaataacctgcaataggcgggtgggtgcgtgcttcctccctgccccagggcttctgcactgaggctggtaggtgggcccctcgctttctgctcttttcctagtccctgtcacacagtaggcccagtgcaagtatttgaagggtgcaaagtgattaaggctctgcctggagaattaaggaccctgatccttgcgctctgcactgcaccccaggctctgacgttcccttttgggccatcaagaacagctggggcactgactggggtgagaaggtgagtcttgctggcttggcccctggccctccagccgccatcctaccctggtgccctcaccagctccccctctcccccagggttactactacttgcatcgcgggtccggggcctgtggcgtgaacaccatggccagctcggcggtggtggactgaagaggggcccccagctcgggacctggtgctgatcagagtggctgctgccccagcctgacatgtgtccaggcccctccccgggaggtacagctggcagagggaaaggcactgggtacctcagggtgagcagagggcactgggctggggcacagcccctgcttccctgcaccccattcccaccctgaagttctgcacctgcacctttgttgaattgtggtagcttaggaggatgtcggggtgaagggtggtatcttggcagttgaagctggggcaagaactctgggcttgggtaatgagcaggaagaaaattttctgatcttaagcccagctctgttctgcccccgctttcctctgtttgatactataaattttctggttcccttggatttagggatagtgtccctctccatgtccaggaaacttgtaaccacccttttctaacagcaataaagaggtgtccttgtcccgag

SEQ ID NO: 995 - DNA, 2895 bp, Homo sapiens
cagaagatccaggccctggaccgtggcacagctcagtatggagtcaccaagttcagtgatctcacaggtagggatagtggccacagtcctcatggatccaggaagagacaggaccttgctcgcaaggcctctggtcaggtctggcttagaacactcttcctccccatgccctgcccacctttgcccgcagaggaggagttccgcactatctacctgaatactctcctgaggaaagagcctggcaacaagatgaagcaagccaagtctgtgggtgacctcgccccacctgaatgggactggaggagtaagggggctgtcacaaaagtcaaagaccaggttggacccctggaagtgagggtgggacatgggcactgcactggggctgacgaaggggcccggctctgactccaactccacccatctcttgtagggcatgtgtggctcctgctgggccttctcagtcacaggcaatgtggagggccagtggtttctcaaccaggggaccctgctctccctctctgaacagggtgagcatctcgctctactcctctgtccccagcctagcccctcaggagggcttcttgggaccagccttctgtctcctagagctcttggactgtgacaagatggacaaggcctgcatgggcggcttgccctccaatgcctactcggccataaagaatttgggtatgcattaatggggtcaggaggggcaaccggagccacttctccctgtacaagaagttacttcataatgggggggagacatgagcatgagagttacacagaactgggtccaggtcttaatgctgacccagccaggcgtggtggctcatgcctgtaattccaacactttgggaggccaacttgggaagatcacttaaggccagaagttcaggaccaggttgggcaacatagcaagaccccatctctacaaaaaattaaagacattagccaggcatggtggcttgcatctgtagtctcagctacttggggggctgaggcaggaggatcgcttgagcccaggaggttgaggctgtagtgaggcatgtttgtgccactgtactccagcctgggtgaaagactgctgggatgagctcttggtgaggagtcagaagttggagttgagttctgtctctgccacttttcttgctggctactggtccctcctccccatctctcccagcctcagatgtgtcatttctagaatgaagacattcttcagaggggatggcctgtggcctggggtggacgaggaatgtgaaacctcgcgtagagggcttagttcatttctggctgtgaatggcaaatgggagcctgcccttctctactcacccccaccgttccccaggagggctggagacagaggatgactacagctaccagggtcacatgcagtcctgcaacttctcagcagagaaggccaaggtctacatcaatgactccgtggagctgagccagaacgagcagagtgagtgaggggcagggtgaggtgaggtcaggtggggccggggcctgggtgcctactgatgccaccccttcccatctcagagctggcagcctggctggccaagagaggcccaatctccgtggccatcaatgcctttggcatgcaggtgaggccctagccccactgcccctgccccatctcttgttgacctccccgacctcttcttggagtcgatcccctactccttctccacctccagttttaccgccacgggatctcccgccctctccggcccctctgcagcccttggctcattgaccatgcggtgttgcttgtgggctacggcaaccgtgagttccgctgcctgtcctgcatccagccaggccacaggcaggggtgggatcacagcatctcaggtcctctagaggggaaatagggggaatgcctaggaaccctgtccttacccactgcctgggccatgaccagctgggcatcatctgtcctctctatggcagggaagctgagctgtgggagggtaaatattgatggcctaataacctgcaataggcgggtgggtgcgtgcttcctccctgccccagggcttctccctgaggctggtaggtgggcccctcgctttctgctcttttcctagtccctgtcacacagtaggcccagtgcaagtatttgaagggtgcaaagtgattaaggctctgcctggagaattaaggaccctgatccttgcgctctgcactgcaccccaggctctgacgttcccttttgggccatcaagaacagctggggcactgactggggtgagaaggtgagtcttgctggcttggcccctggccctccagccgccatcctaccctggtgccctcaccagctccccctctcccccagggttactactacttgcatcgtgggtccggggcctgtggcgtgaacaccatggccagctcggcggtggtggactgaagaggggcccccagctcgggacctggtgctgatcagagtggctgctgccccagcctgacatgtgtccaggcccctccccgggaggtacagctggcagagggaaaggcactgggtacctcagggtgagcagagggcactgggctggggcacagcccctgcttccctgcaccccattcccaccctgaagttctgcacctgcacctttgttgaattgtggtagcttaggaggatgtcggggtgaagggtggtatcttggcagttgaagctggggcaagaactctgggcttgggtaatgagcaggaagaaaattttctgatcttaagcccagctctgttctgcccccgctttcctctgtttgatactataaattttctggttcccttggatttagggatagtgtccctctccatgtccaggaaacttgtaaccacccttttctaacagcaataaagaggtgtccttgtcccgag

SEQ ID NO: 996 - DNA, 3073 bp, Homo sapiens
gggagagacccagagagggatctttattcagaagcacttggctggcttttctcttaggcccttgctccgagggacggatgggatcagccacagggtgcatcctctctccatcttgcatagagaacctcagtggttggggtcaaaggtcgctctccccatagagggcactggagaaggccacgtagtccagggctccagccggggccccggatcccttgtagggcaccatacggcggatgcagtactcggcctgcttggcagggagctcgcgccgcagctcctcgggggtgatgtagttctggggagaagaggcgttgaggacccacaggtcccgtgccctgccctagcccaccagcccctccaccgcctgggactcaccttgtctcctgccaagatcttgaaggaagctacaacttgctcagtcgtgtcagtctcggctgtctctcgggtcatgaagtctatgaaggcctggaaggtcaccaccccagctgcgttggggtccaccatggtcatgatgcgagcaaactccacttccccctgcagggatagaggccaggcactatgcccatgagcactaaagccaggagggctcccagtgtcccctcctggggactgtccaacctcagctagcagagccccagtaacaagggagttcccttcctccagagaccttagccctggctgtaggaagtcctttatggtaggctgaaatctgcatcctacccacagcaggaagcagatttgctccctggtcctgattttttttccagggccacacccgtttctgtagtgctgtttccctacaggtaaaaatgttgcaagctcagactttgggtccacacagaactgggtccaagtgagttttacctccctgagccttgctagcccctgtgtggatgtagtgaagatgcaggggatggtgtatgtgaagatgggaggtgcacagtaggtgatcagcacagaggagggggtactttgggactcctgggaaggagctggggagctctcaccaggtcatagcccatggagatgaggcaagctcggaagtcatcaggctccatcatcccattctgcttctgtagggggtgagtggttatcaggcttggtctccagcctccaccagcccccaagtgtcttaccccacagggccaggcccctgctgaccctgtcaaagtggttgaaggatgctcggaactcgttgagctgctcctggctcagtcccttggcgtctcgggtcagtacctggttctccacttcattgatggtgcgggcaatggaggtgagcagctgctcccagcccacgcggatgtgctggcggtcaggggacaggccactgtcagtgggcggccagtgcctggccactggctctagctccacatccagttcactgaatgaccctgggcaagtcctccccctcactgggcctccatccccatctggaggctccactgagtaacccacccccaccccagcagtccttcctgtcttttgataaccagctatggccaatcttggcctggttttggacggctttgtgactctggaagggtcactttccatcgctgggtcttaagggacctggccaagctgaactggggactctgctgggacacacatgctctgtccagctgtgatctccctgggcctcctcagccagtgctgcctccccactctcctgagagggtgtgatcccacctccatgctgtagacggtgtgcttattgtcgaacaccaggctctcctgcagcagctggtggtcaccctccagccggtcaatgttagtcttgtagttgataatgttctgctcctgctgccgtagcccagccatctgctcctccagagagccagctagccctgctgccagccgccccacttcctgcaggggttcccaggcagcatgagggctcccaactccctgtggcccagccctggccccatccccccaggttggacccactatcccagcccttacctccaccttcgcctggatccagggtccaatggcattggcctgggccgcaaactgtcgccggagcctctcgtttacctgctgccgtgccagctcctcctgcagtgtctggtcacagctgggcaccagctttcggacctgggaggagggcagttatgccagagccagctctgggggctgggaaatggctttaggggagatgggctccagcccctcaaacctcagcccctgttgctttgagccaacttgtctgggatatacgagaaagctcttgggcaagtcactaacccatgtgggcttcagttttctcatctgcaaaatggggctgatggcatcatttactaatatgggtggatttataaaagatgtccacacacaaggcttaattctacttcacatcagtcctgacaggagaatgctgctgttacagctcatcatatacagatgagcccgagacaggcaaggcgatttatccaatcccacgtggagtctgtggcagaccccacatctgaagatggactttattctccatatcttgggccacccgagatttcagggtggtcacagtatgcaggagggggtgggaggaaggctgcaggtggcactgaccatatcccacttggtgttgatgtcctgcgggctgagggtgatgtagggattggtggagcagggccgcagcccatacgtctggcagatcttctggatctcaccctggatgcccatgatggcacctcgctctcagtcagcctcgggcagtgttgccttgaactgatcgtgcgctgtcagcaggctctggggacgacaggcaggaagtgtcagctggtgtcccccacttaccacaggcaacagaaagggcagcagtgtgccccaggccacccaccagtcctgggcagtcctgacacaagaaccccggcctcctgtcttccagcccagcactcgggaactggggttttcctcccatccctatgccccaggagcctaaagttgtgggtggcagaatttggggccagctttcctgtcatcctatccatcccctgcaaccctggcacccacctgggtctcctccacagagtgtaccagccacacgtcctgcaggtcctccacg

SEQ ID NO: 997 - DNA, 1198 bp, Homo sapiens
gggagagacccagagagggatctttattcagaagcacttggctggcttttctcttaggcccttgctccgagggacggatgggatcagccacagggtgcatcctctctccatcttgcatagagaacctcagtggttggggtcaaaggtcgctctccccatagagggcactggagaaggccacgtagtccagggctccagccggggccccggatcccttgtagggcaccatacggcggatgcagtactcggcctgcttggcagggagctcgcgccgcagctcctcgggggtgatgtagttctggggagaagaggcgttgaggacccacaggtcccgtgccctgccctagcccaccagcccctccaccgcctgggactcaccttgtctcctgccaagatcttgaaggaagctacaacttgctcagtcgtgtcagtctcggctgtctctcgggtcatgaagtctatgaaggcctggaaggtcaccaccccagctgcgttggggtccaccatggtcatgatgcgagcaaactccacttccccctgcagggatagaggccaggcactatgcccatgagcactaaagccaggagggctcccagtgtcccctcctggggactgtccaacctcagctagcagagccccagtaacaagggagttcccttcctccagagaccttagccctggctgtaggaagtcctttatggtaggctgaaatctgcatcctacccacagcaggaagcagatttgctccctggtcctgattttttttccagggccacacccgtttctgtagtgctgtttccctacaggtaaaaatgttgcaagctcagactttgggtccacacagaactgggtccaagtgagttttacctccctgagccttgctagcccctgtgtggatgtagtgaagatgcaggggatggtgtatgtgaagatgggaggtgcacagtaggtgatcagcacagaggagggggtactttgggactcctgggaaggagctggggagctctcaccaggtcatagcccatggagatgaggcaagctcggaagtcatcaggctccatcatcccattccgcttctgtagggggtgagtggttatcaggcttggtctccagcctccaccagcccccaagtgtcttaccccacagggccaggcccctgctgaccctgtcaaagtggttgaaggatgctcggaactcg

SEQ ID NO: 998 - DNA, 245 bp, Homo sapiens
cttcagtggtggccaggcatggtggctcacacctgtaatcccagcactttgggacggctgtggcgggcagatcacctgaggtcaggagatcgagaccatcctggctaaccccgtgaaaccccgtctctattaaaatacaaaaaaaaattagccgggcgtggtggcatacgcctgtagtcccagctactcaggaggctgaggcaggagaattgcttgaaactggcgggggtggtggaggttgcagt

SEQ ID NO: 999 - DNA, 12127 bp, Homo sapiens
cgaactctttttttttgttttttttttgagacagagtctcgctctgtcgcccaggctggaatgcagtggtgcaatctcggctcactgcaagctctgcctcgccggttcacaccattctcctgcctcagcctcccgagtagctgggactacaggcgcccgccaccacgcctggctaattttttgtatttttagtagagacggagttttttaccgtgttagccaggatggtctcaatctcctgacctcgtgatccgcccaccttggcctcccaaagtgctgggattacaggtgtgagcatccgcgcgcagcccaaaacccatgttctttacctctgttattctgaatgtagctcatctaagtgaacacacaatccaccaagatataccagaaaataaacagcagcttggaaattaggcttttaaacatttggttggctcacagaatcagttttaaatggcagttcaaaagtcaccttctccaagaagggttcattcttcctttctcctttcccgtaaccattctttatgccactggtccttagtctttagaatgttagaattaaaaaagccttgggggccgggtgcggtggctcacgcctgtaatcccagcactttgggaggccaaggctggtggatcacctaaggtcaagagttcaagaccagcctggccaacatggtgaaaccccgtctctactaaaaaatacaaaaattagccaggcgtggtggctgatccctgtaatcccagctgctcgggagtctgagtctggagaattgcttgaaaccggaaagcggaggctgcaatgagccgggatcgcaccactatactccagcctgggtgacagagtgacactccatctcaaaagaaaaaaagaaaaagccttagaccattgcttcattgtacagataaaggaacaaaggttcagaggctggcctgaccttccagtagcacacagggctggaccagaataaggaatggaactgacatcttgggggagctcaagcactctaccatctgcctggtgggctggacttatccttcccctcatttgactcttttcctagctgcaaccttgagggaatcaccacctctgacttctttcctttgaatccaaggttactctgctcctcgatttctccctcatatcaaatttactaaccaatgtcagtatttgactttctttgtgacaggggatctccagtaacccattctaagagttaatgatgaggcagcatggaataggaactgagggtggaagggtttcaatcttggctcctccacctgctagctgtgtaacctgggtcaagtccctaaacctctgtgtgcctcagtttcctcctctatgaatggtgataataacaatatctatttcagagagttagtataaggattaaatgagtaaatattcattaaggactagcacacaagcactgcagaagtatttaagttaaagaataaataatttggctataatgtctatttaacagaaaaggaaacagaggctcagagattacatgacttggctttactcagtgctcttttcggtacactgctttctaatgcatggtcctgtctgtgctcactgagaaccagattccagtgagaagacttcaaggggtcttggatgctgttggaaatactgttccctcatctccttctgggcctgttatgaagtcgttgtgatgtgagcaaataagagtgaagatgtcagccaggcatggtgcctcatgcctgtaatcccagcactttgaaagtccgaggcaggaggatcacctgagcccaggagtttgaggccagcctgggcaatatggcaagacctcatctctccagaatttaaaaaattagctagacatggtggcacacacatgcagtcccagaaactcaggaggctgaggttgaaggatcacttgagtctgggaagtcaaggctgcagtaagccagcattcatgccactgcactccaacctgggcaacagagcaagaccctatctaaaaaaataaacaaataaatgagagtgaagatgtcatatccaataagcaaactgaatctaaaaatgctgactaaacattaatagttatttcccttttatctcaattaaatgagctagttaagtccctgcatgcacactctcctgtctctttcattgatttcacagtaaagtttatagctatgtaaaattgcattatcatgtatccaccctttgtgcacatgttgggtaggatattttaagggccatctcctttatattcaaagcagctcatactgcttgtggtcactacctgtttgccttgagattggctggaaatttctagagattctttactggttagatcaaggagattcagcagacagagaaggcagagacctctgccatcagcagcccagctcaggatgcccattgttccaggttaatggggttgacctgaggaactccagccacgaagaagccatcacagccctgaggcagaccccccagaaggtgcggctggtggtgtatagagatgaggcacactaccgggatgaggagaacttggagattttccctgtggatctgcagaagaaagctggccggggcctgggcctgagcatcgttgggaaacggtaaagacgtgctgtgggagttgggatctgcctttttcatccagagctctgatgcctgtgaacactgaaagagaaagcctaatgtaaagtagtgatgggatttctaaaaataagatatttatgaaaatttgacaacatgggtcatatttctgagcaaggtcttaccagaaaaattgtcatatcaagatagaactccaagtccaatcaatccagactgatatatttctgtacagagtaagaacaactagcaaggttctttcacttggaattactaagatcggagttttgcagaggttgattaaagcaaccatacccaagaaatagctagcatcaagaatgagatttatccaatgttgggtcaagaacattgcttcgacatggaaattaacatggaacattgcttttcgtgatactgttaatttcatactatgttgaaactagttgagtagacatagttaagagataaacataattcttcacgatagtagttttctattaagaaaaatgtcctgctgggcacagtggcatgtacctgttgtctcagctatgtgggaagatcacttgaggccaggagttcaaggctatagtgtgctatgatcatgcctgtgaatagccactgcacttgagcctcttgggaaacataacaagaccccatctgtaaattaaaaaaaaaaaaaagaaaaggaaaaaagaaagatgtccccaaagtaatagtttgcaccaaaaatgtaggtaggtagatcctagtggccaggctactcttttgaaatatatgttgctgccagatgcagtggctcatgcctgtagtcccagcactttgggaggccgaggtgggtggatcacctgaggtcaggagttcaagaccagcctgaccaatatggtgaaaccccatctctactaaaaaatacaaaaaattagccaggcatagtggcagacgcctgtaatcccagctacttgggagactgaggcaggagaattgcttgaacttgggaggtggaggttgcagtgagctgagatcacgccattgcattccagcctgtgcaacaagagcgaaactccatctcaaaaataaataaataaataaaaagaggtatatgttgcctaggccaggcatagtggctcacgtctataatcccaacactttgggaagctgagttgggaggatcgcttgaggtgaggagttcaatatcagtctggcaacatagcaagacttgtctctaaaaaaattttttaaataaagaaaaatgaagtctatactgcttaacagtcgtttgttccaggataatattactaagtttctcttgcagtgaattggaaaggtaagtaatagcttgaaacaaagcctagcttccatggtttactggcttttaggtatctagtatgtatttatcccaacagggctataggatttccaggtaatatcctaatatggccttaaagtgtatcaaccatcttgttaaggaagaaatcaagttgcttttatgcatgttatgttatatgccctcacagacctctggtgactagcctagtgtctgtccagcaggccaagctgttattaaaataaaaatattagctacaatttttgagtactgattttgggccaagtattgtgctgtcataatttcatttttttttacttcagcaccatagaaccatcactctgaaaatgcattaccaaacaaaaaaagctgagtctcttacatttctaaacaaaaatcagtgcacatctgggtgcagagcaactgacagagccagtgttgaagtttgctttcttgttttgacacatgcgtatacctggtgcggttttatttacagcaatgttttttgcttttagtgaatgtcagtatttcaggttgagtttgtaaggaacatttacattccttagcacaaaaacttgcattgtaaaggatgagatgtatagttctcaaaagtcactattttctttgactaacaattccatcaccaggactttatcttaaagatatacttacaagtattcattgctcattgcaatagttaaagaatggaaataacctgtatgtccatcagtaagctactggtaagtgaaattatgaaacatcatagaatagtatgtagctatttaaaaaatgaggaagctccaagtgctgataaaggcaaattaccaaggtatgaaagaaacaaaaagaaaacaaaactggaagaagaaaggagcatatatgtgtgtgcatcctgtcacacacacacgtattatgcatggaaatattaggttgtgccaatactgcactgctgtatggtattaacagaaatggaagcggagtgtttatttctgacatcgtgaaaggcggagccgcagacctggatgggagattgattcagggagatcagatcttatctgtgaatggggaggacatgagaaatgcctcacaggagacagtggccaccatcctcaaggtgagttgctaggctgctttttacccagctggcacaactgaagtccagtgggaactgttccagtctagcttgattataaaatgggttggattttatactaactctagtttttactagaaatttaatctctgattattttaaatgagccagaatagctttaaaagaaagttctgttatattgactaacagaatgaaagggaacctgctttgggatttcacaagcaagtttttcatacttgtgagaattctaagtatccatcactgttctttaaatgcatttgatgagatgggccctccaggagccacagaattcatcctcctctctctagggctatgcctgttgctttcattacccttttataatttgtggctgcagggagaggctctgttaagatatttcagaatataaatgctactacttttcatttctgttcttttcttgcctttccaagtgtgcacagggacttgtgcagctagagattggaagactccgagctggttcctggacctccgcaaggacgacatcacagaacagtcaggttgtcgatggcttctcatcagactgactcactcttctgcccccactgggagaaagttccccatttaataaatggttgtttggaaataatatctaatgtacagcatattcacagcaccaagtttagtgaactttcatgtgtttgaaataaaaatgaaaggtgggatggaaattcattaatccctagatttttctctcctttattgcttgcaaatgttttcttggaagctcttttctctctattagttctatattgcctatgcacgcatgtacacagctgtgtttatttaaaaaaaaaaaaaggcaacatctggtggcaatttgaccctcattagcacaacattgttctattcattcaattaaatattgctataaagttaacttgtgactagccactcacacatgccgagggcaattaatggcatattcctaggagaaccaagtgtgggggtttttcctgtgggagggagggcttagtgggtgatattttgtgggttagcaaacatcttatatttatttgcaaagctgatgtaagtgccatttttttttagcaaagtatatttcactatatttttttcattgtaatggctgacaaaatcaagatggtagactgtatggttagccccatgtggtacataatgagactatagaaacttatatgtgacccctaagtctcctctctgggttatggataggccgccttagttttgaggttaaaagcatgacttttggtcccctccctggttgccttatttctgaagcctctccaaggcctttgttcagaaggtgctctgatcttacagttagcacacagttacttctggaaagctattagctgcctcctgttcctcactggtgttaaaaaatgagtgaggaaaataccattgttcagataggattacagactagctggcttgtcttagggaatcttcaaagcagtcaaacccaataaacaccatattaagtttgaaacactttttttttttttcatttctggcttacataatgggcagcaaatatctaagacatggtgctgctgtaggattccatgagttaatagttagtgatgatattgaccagacttatatcaacaaacgaaacagttgtctagccaggcttcttccttaatggaagactcatctttgttgaatgatttcattaaagccttattgtatacagaagattagaatgaagctacacagaggaggttccattgaatctcactccaaatggagtttggggaaaagaaggaaaaggcatctcagacagggaaaatagcatacacaaaggcccaaagaggtaacaggtgtttgtgtgatttaagaaaagtttggactgatcgataggtaaggtagtggatagaaatggatttctgtccctcttgagagatgtatgtgagcatcttcttatttatttatttatttatttttgagacggagtcccactctgttgcccaggttggagtgcaatggcgcgatctcagctcactgtaatcttcgcctcccgggttcaagtgagtctcctgcctcagcctctcgagtagctgggactacaggtgcccgccaccacatccggctaatttttgtatttttagtagacacggggtttcaaaacatcttggtcaggctggtctcaaactcctgatctcaggtgatccacccacctcggcctcccaaagtgcctggatgacaggtgtgagcccccgcgcccagccgcatcttcataatttttaagttcacactcaaagacagaactaccaaatttagaagctacatcattaaatatcaaaaaaaaaaaaaacctatcgtctccacttacctggtatatgaatgtgagttgtcatattttggaaacctgggacaaagtatcaaatactttgccctaatcttcttacacagaattttaatttcagagggtaggagtttaattcaatttttaaaaacagtaaatatatcttatcatcaccttgtgcttaaaattatgggtgagatagaagagtttgccctatttggctaattagaagaaggctggtagccgactgtgaaaaggaaatgtcttcccatcatgatgagttgaagactgaccctggtgggcaaaaacaagattccattgccaaacatttttacatccagacccatttaaaaaatcaggatcttgtaggaacacagatttccttctgagcagttacaaaatagggagatcaatgccttcttttgagcgctaaggagaataagctcttgacttaattcatagaaagtgagttcattaagagagaaataacttctagctttggggccaccaagtgtctttttttaaaatgactttcccccaaaccaggaagaaatttccttactccacagaggaaaaaatacttgcgagatcttttcctcagccaactaagggaacacagtcaggcaaagtgtacttttataaacgtcttggggccgggcgtggtggctcacatctgtaatcccagcactgggagttcgaggcgggcagatcacttgagggcaggaattcaagaccagcctggccaaagagcctggtgaaaccctgtctctactaaaaatacaaaaattagctgggcatagtggtgggctcctgtaaccccagctactcaggaggctgaggcaacagaatcacttgaacctgggaggcggaggttgcagtgagctgaaattgcaccactgcactacagcctgggtgacagagggagactcctcaaaaattacaatacaatgcaataaaggtcttggcaaacacacctttctgaaattttttaaaggcaaaagttataatatactgtacttcctcagttctgattagttatctattatagtaccatttacttaaatcatatcctttaaggaaaagtataaaaacactcctttaaatgtatatagccactatgaagtatactgagatctacaacttactttgaaatgaattttttaaaaaaagatgagtgatgaatagataaatggctatgtgataaaggaaatatagcaaaatactcattgtgaaatctaggtgctatttatatggatgtctattgtataattctttcagcttttctatatatttgaaggttttcatattttaggaattaaaatattaaacaactttcatcatagagttaagaaaatggaccaaattataatttatgaactgataacagtgatcttaggcttagcttaaaattttgatgcagaataatttggtagaaaaaaatattcattatttgcaatgttttcgtctacataagaaaggcccttcactatgtatacagtttttgttgaacagccactagccttaaaagactacacagtattaacctcacatattcatttaaatgaataaagggacaggtaatggagatctagcagattggactaaattattactgattctaggaaaatctttgagaaaaaaatgttatatatccctaaaacaagtctttttcccttcagatttggtgcttttttccccacaattgagggttctattttggcaggtttctgctaatcaaggtcttattatacttgttttagcaaaatacataatacattttgggtaataaagttgactgtaaccccaaatgaaacatagtgcccattagctgactatatatacataaacactatgtggcaacctaggaaaatggttttgattttatgtggagcaagaacagctgaaatgattctatggtctccaccttggtgattgaaaccatatacaaaagcacacataatggagaaagcaatggaggaaatgtctaaatgggattgggttgaggtagtaagagaatagtgtgggtgatttttgttttctttcctggcctcctcacgattttctgttagatggttatggtgacatcagtaattggcacactaatggataagtatgcatttagggggtcaagtcagtgtctgcacacaggtgacccctgggtctttctttcagggtagtcagcagagtgcacacagcagctgtcatccctccttcgctcctgtcatcactggcctgcaaaacctggttggcacaaaaagagtttcagatccttcccagaaaaattcaggtattacacggacacacccagagcaaaactatcctgttacccaaattaaaaaaaaaaaatgtgttttttaaaaaccagtcttctttaatataaatgttttttaattttttgagcttggccacataagctgagctttctgaaaggcatgttctgaaggtaggaaagccatagagattccttcagtggtggccaggcatggtggctcacacctgtaatcccagcactttgggacggctgtggcgggcggatcacctgaggtcaggagatcgagaccatcctggctaaccccgtgaaaccccgtctctattaaaatacaaaaaaaaattagccgggcgtggtggcatacgcctgtagtcccagctactcaggaggctgaggcaggagaattgcttgaaactggcgggggtggtggaggttgcagtgagccaagatcgtgccactgcactccagcctgggtgacagagcaagactccgtctccagaaaaaaaaaaagaaattccttcagtggcacaacacaaagcacctgaaaaacagaaaagcagaaagctggagtgcatggtaaaataaaattacttacaaagagaaaattaataaattacaggtcactggagaaaggtcagaagtgtgtataccttctatgggaaaattgggccagttaaaagaaaaaaaaaagtgtgtatatccttgggggcagggtgggacaaggggtccttttaagtcttttgttgaatggagggttatctttgattaaggtagaaaaaaatgtacaatgaaacacaaatgactcagccgggcccggtggctcatgcctgtaatcttagcactttgggaggccaaggcaggcggatcacctgaggtcaggagtttgagagcagcctggccaacatggagaaacctcgcctgtactaaaaatacaaaaattagccgggcatggtggcacatgcctataatcccagctacttgggaggctgaggcaggagaatcgcttgaacccaagaggcagagatggcagtgagctaagatcggaccactgcactccagcctgggcgacagagtgagactccatctaaaaaaaaaaaaaaaaaaaaaaccacacacacacacaaaaatgagtcatcctccaagcatttactcaccatgttccaggcagctgctgctatatagcccatccacttttgtcagaccaaatggttatggccacattgatctcaaacagagagcacttctttaaaatagaggacacagcaggccgggcacggtggctcacgcctgtaatcccaacactttgggaggccgaggcaggtggatcacttgaggtcgagagtttgagaccagcctggccaacatggtgaaaccccgtctctactaaaaatacaaaaattagccgggcgtggtggcaggcacctgtaatcccagctatttggaggcagaggcagaagaattgcttgaatctgggaggcagaggttgcagtgagctgagatggtgccactgcactccagcctgggtgacaaagcgagactctgtgtcaaaaaaaaaaaaaagaggacatggcccctggtgacttggctaccagcttggatgctgaggaagggtacaatacctgcttgctttagtgtcttctcttgaaagacctagaaaatgaaaccatttttcatggggcaatattatatgctaaatatattattttttaatattaaaaagttaattgtgttgcttctttataggcacagatatggaaccaaggactgttgagataaacagggtaagtcagtcattttgctgtatgtatttttctggtttgtgttggatttgcactaaatgtacattttccccaatacagtttattggattgtgagtgtgctctttcaagttactgagataaaaatatggtctaaataacatcaataaatagacttagaaaagtacagtagagcacagagatgacctctatgaattttttggcaaatctcatccactatattctgtgctatgtgtaagttttatttttatttatttattttttcaatcttagtcttttaacctgtacatgtaaagttttataaaacaaaaatggtatcatgtggcacatactaaataagtattttttgagagcatatagtatgatttttatcgatttcatagtactccatcttatgaatgtgctataagtttcttttttttttttttttttttttttttgagacagagtcttgctctgtcacccaggctagagtgcactggtgcgatctcggctcactgcaagctccacctcctgggttcatgccattctcctgcctcagcatcccgagtacctgggactacaggcgcctgccaccacgcccagctaattttttgtatttttagtagagacgggttttcaccgtgttagccaggatggtctcgatctcctgacctcgtgatccacctgccttggcctcccaaagtgctgggattacaggcgtgaggcaccgtgcccggc

SEQ ID NO: 1000 - DNA, 245 bp, Homo sapiens
cttcagtggtggccaggcatggtggctcacacctgtaatcccagcactttgggacggctgtggcgggcggatcacctgaggtcaggagatcgagaccatcctggctaaccccgtgaaaccccgtctctattaaaatacaaaaaaaaattagccgggcgtggtggcatacgcctgtagtcccagctactcaggaggctgaggcaggagaattgcttgaaactggcgggggtggtggaggttgcagt

SEQ ID NO: 1001 - DNA, 112 bp, Homo sapiens
tttttttgagaaggagtttcactcttgtcgcccaggctggagtgcaatggtgcgatctcggttcactgcaaactccacctcccaggttcaagcgattctcctgcctcagcct

SEQ ID NO: 1002 - DNA, 604 bp, Homo sapiens
ctaatcaaggtcttattatacttgttttagcaaaatacataatacattttgggtaataaagttgactgtaaccccaaatgaaacatagtgcccattagctgactatatatacataaacactatgtggcaacctaggaaaatggttttgattttatgtggagcaagaacagctgaaatgattctatggtctccaccttggtgattgaaaccatatacaaaagcacacataatggagaaagcaatggaggaaatgtctaaatgggattgggttgaggtagtaagagaatagtgtgggtgatttttgttttctttcctggcctcctcacgattttctgttagatggttatggtgacatcagtaattggcacactaatggataagtatgcatttagggggtcaagtcagtgtctgcacacaggtgacccctgggtctttctttcagggtagtcagcagagtgcacacagcagctgtcatccctccttcgctcctgtcatcactggcctgcaaaacctggttggcacaaaaagagtttcagatccttcccagaaaaattcaggtattacacggacacacccagagcaaaactatcctgttacccaaatt

SEQ ID NO: 1003 - DNA, 13862 bp, Homo sapiens
cagagagccccaggcatcgaggagaaggcggcggagaatggggccctggggtcccccgagagagaagagaaagtgctggagaatggggagctgacacccccaaggagggaggagaaagcgctggagaatggggagctgaggtccccagaggccggggagaaggtgctggtgaatgggggcctgacacccccaaagagcgaggacaaggtgtcagagaatgggggcctgagattccccaggaacacggagaggccaccagagactgggccttggagagccccagggccctgggagaagacgcccgagagttggggtccagcccccacgatcggggagccagccccagagacctctctggagagagcccctgcacccagcgcagtggtctcctcccggaacggcggggagacagcccctggcccccttggcccagcccccaagaacgggacgctggaacccgggaccgagaggagagcccccgagactgggggggcgccgagagccccaggggctgggaggctggacctcgggagtgggggccgagccccagtgggcacggggacggcccccggcggcggccccggaagcggcgtggacgcaaaggccggatgggtagacaacacgaggccgcagccaccgccgccaccgctgccaccgccaccggaggcacagccgaggaggctggagccagcgcccccgagagccaggccggaggtggcccccgagggagagcccggggccccagacagcagggccggcggagacacggcactcagcggagacggggacccccccaagcccgagaggaagggccccgagatgccacgactattcttggacttgggaccccctcaggggaacagcgagcagatcaaaggtgaggaggctgcggggcacagtcagggctgaggtccggctgtttccgaggcgtgcggagggtgagtgtgggtaaacatgtcgggtcgggctggcagtgatgaatgcaggtcctgaagcctgcaccacctgggctcacatcgtggctcagccccctctctagctctttggccttgggcaaatgtccttgctgcacggtgcctcagtttacccatctgccaaaaacggatggcagggatagaacctacgtcatagggttgctgtgaaggttaaatgaattaggacatccaaggcacttaatcagagcaagggattcagtaagcacctgcttttattattgcaactcacttagaccaggggtctcaaactcatgcccacaggggccagacgacatagggaaacggatgaagcatgctagggaggcagagtggggcttcagaagaaaatgccctgtgtagaaggggcagccacttctcaggaatgtgcacctggtgttggcgaatctgctacttttcccttttaaactagagctctggtttttatttcttttgtttttatggttgcagccagttcaaaggaagcctgtctgtggatggctcaagggccccaggctgccagcgtgtgctgatttaaacttaataagctggctgggctctgtggctcatgcctgtgatcccagcactttgggaggctgaggcaggaggatcacttgaggtcaggagtttgagaccagcctggccaacatggcgaaaccccatctctactaaaaatacaaaagttagccaggcatgggccgggcatggtgggtggctcatgcctgtaatcccagcactttgggaggccgaggtgggcggatcacctgaggtcaggagttcaagaccagcctggacaacatggcaaaaccctgtctctattaaaaatacaaaaattagccaggctttatggtaggcgcctataatcccagctactcggaaggctgaggcaggagaatcgtttgaagccaggaggcggagtttgcaccgagccgagattgtgccactgcactccagcctgggcgataaagcgagactctgtctcagaaaaaaaaaaaaagaaaagaaaaagaaaaaaagaaaaaattagccagcgtggtggcatgcacctgtagtcctagctacttgggaggctgaggcacaagaatcacttgatcctgtgagtcagagattgcagtgagccgagatcacgtcactgcactccagcctgggtgacagagcaagactctgtctcaaacaaaacaaaacaaaacaaaacaaacagaaacaaacaaacaacaactttccagtaagctaaggcatctatccagtgtgccaggcctcctgtgttcgaggccctgagctgcccaaggctgggacccagggagcttcagatcttgccctgacaactccaccaccataggactagtgagctggaaggcacagatatgcctttctgaaaattaagttttggtaggaatgcaggaagtattttgccacagagaaaactctttaagataaatgaagggtaaaaataaatagcccttgtttagatgtggacataggaaatacagttccagcagaatctctgggaggcgcaacttctttaaatacgggtatgaaagttataagtggctgggtcctgttttatattggcaacctcacagccacacttgaggaaacagttatcatctccatagaggagcctgtggctcagtgggcaagggtcaggaagtgggctggacagaggacgtttcttcctcatagcctgtggtgttcgaacactgtcacttccttgagattgttgtagggagtttgtgaacagctgtatcaggaaacagcccaggctgcatgaaaatgttgggagatgagcagctaagatgcgtcagaggatctgggttggattaggattggggggtgaaaagaggcagagaatggcccgctttttcccaagtgaactactcatccttcaagaccccaaatttcccctttccaggaagccttccctaatttttaaaggttgtcaacctgaccttcatctgggtactcataactccagaaaaaccccctctaggctgggtgcggtggctcacacctgtaatcccagcactttgggaggccgaggtgggaggatcgcctgaggtcaggagttcgagaccagcctggccaacatggtgaaaccctgtctctactaaaaatacaaaaattagctgagcgtgggggcaggcacctgtaatcccagctactcgggaggctgaggcaggagaatcgcttgaactcaggaggcggaggttgcaatgcgccgagatcgtaccactgcactccagcctgggcgacgagagcaagacttcatttcaaaaaaaaaaacaaaaaaaacactccctctatgaagcatcgcccataaccccatcaccctgagatgtctggtcaacaaaagtgtgacttttgagcagatgtgaaggaaaggagggagtgaggcaggtggacatcggtgggagagtgttctagagagggcactgagatgtgcactggctcaccatgtttagagaatagcaaaaggtagtaaaacttgagtagagagaacgaggacctgagagggaccgtctgcattcatctttctccctgccccacctccaccctcctcttgcccctgccatcagctcagaaagggcagttcacttatgcagtaatggagggctaagtgacccttgttcatttgccagtgaggaaacagaggctcagagaggtggatctggccgggtgtggtggctcatgcctgtaatcccagcactttgggaggccaaagagggcagatcataaggtcaggagttcaagaccagcctggccagcatggtgaaaccccgtctctactaaaaatacaaaaaattagccgggcatggtggcacgtgcgcctgtagtcccagctattcggtgggaggaatggtggggtggcccatgtggctagatggaggtcaggccagaggaggtggggacagaggccagagaaatcaggtaggccagggcatgagggcctggtgggctgtgggaagttgcggcttaaagccgttggcactggggagctctggggaggttgagcactggagaggacctttcccaccctgcctggagaagccctggtgcagcccttccgttcacaaagtgggtgctgaggcccagattgtgcgggggtcttatctgaggccacacagctaggtgggagggcctgcctcagtttcaccgggacaggggctcaccaggtctctcccctcgcagccaggctctcccggctctcgctggcgctgccgccgctcacgctcacgccattcccggggccgggcccgcggcggcccccgtgggagggcgcggacgccggggcggctggcggggaggccggcggggcgggagcgccggggccggcggaggaggacggggaggacgaggacgaggacgaggaggaggacgaggaggcggcggcgccgggcgcggcggcggggccgcggggccccgggagggcgcgagcagccccggtgcccgtcgtggtgagcagcgccgacgcggacgcggcccgcccgctgcgggggctgctcaagtctccgcgcggggccgacgagccagaggacagcgagctggagaggaagcgcaagatggtctccttccacggggacgtgaccgtctacctcttcgaccaggtgcggaacccgagagggcgcggtttcggggtcgcggcctggagggagcaggagcctagagccgggaagggcctggcgggaggccgagcttagagttgggcggggcctggagggaggcggagctggagtggggcggggcctgaagggaggccgagctagggtggggcggggcctggagggaggccgagttagagtggggcgtggcctgaagggaggccgagctggagtgatgcggggcctggagggagggcaagctgaattggggtgggacctaaggggagccccaatctagagtggggcggggcctggggcggggccgagctagagtggggcggggcccagggagagggcgggctggggggcggagcccagggcggggcctggagggaggtcgagcctagaggtgcagggcctggggcggggcctagacgaaggctgagcttagggtggggcggggtctacagcagggtttgaaggcaggctgagcctagagcgggggcggggcctggaaggagaccgcgcctaggatcgggacagagtctggatccgggcctgagggaggccaagtctgtggcgcggcaagaggaggcctggagaaaatccaaggctggaatgggggcggagcctagggcggggcggatggagcagggcgcgggaagggcctgaggggtgaaggcggggtctggggagagactggtcagggaaatggggcgggactaggaagatgggaggaggctttgagtgtgagggcagggcctggcaatggggcagggccaggagtatgggccgagcctagagctggggcgggacctagggtgagggcagggcttgtgacgggggcgtggtctagagggcgaggagaggtctggagagagagtgtgggtctggaaggaaagagggggtactgggtagtcaagtatgggatcctggagaggctagggaggaagtgttgagaagaggcctggatggtgaaggggcctagtgagagtttgggcatggtttgttgactagagttctagtgtctgtaggctggttcgggttggagcagatcttacccactagggaagggccatggctaggctgcaggtgggcttcagagatggagcaggcagtcttaacgtattctggggtgaggtcagggatgagcgaacctaacgactgggacgggtctttagagagatgggttgaggaatgtgttaagagttaggcctgtcccgggtggctcacgcctgtaatcccagcactttgggaggccgaggcgggaggatcacttgaggtcaagagttcgagaccagcctagccaaaatggcgagacctcgtctcttaaaaagaaaaaaattatcttggtgtggtggtgcgcatctgtagtcccagctacttaggaggctcaggtgggaggatcgcttgagcccaggaggttgaggctgcattgagccatgatcacaacactgctctccagcctgggcgacagtgagactctgtctaaaacaaaaagaaaaacacaggatatggtgttgaagagaaaaagggagggcgagtggtgctgaggaactgggaccttgtctagatgaacctggggcgggcatactgggctgagattatgaaaggaatggaaacaaggccaagaactggggcctgggccactgaaatgttttcagaggggtgggacttggagggcgggagcaggtctacttctgagggagggctcaggggcagggtcacagcatccagcacggcatgcgctcaggatggggcaggggttgggagggccactggagcaggtcaagatctcagaggtgggtgggactgacgtggacggggtggggcttatggagatcgctttgggttaggggatccggtggaggcctcacgttaatgagccaggagagaatccctgcgttgggctacttagctgtgcgcggggctccgctgtcaggaaaggagcctctggccaggttgaggttaaggctggcccaaggcttcgaagccagattaggggctccagccacctctccagagcgtgcgagtcagtgattacaaattgggattcctagagccccagaaatattagccggttttgttgcttttgggggatgcggtaaatgggacgtgaaggtttgtcccctctggcttccccctaatctgccttcacaggagacgccaaccaacgagctgagcgtccaggccccccccgagggggacacggacccgtcaacgcctccagcgcccccgacacctccccaccccgccacccccggagatgggtttcccagcaacgacagcggctttggtgaggacgggccctatggggcgggagggggcgggagccatggggcggacggggcggggtctatggggtgggaggggcttggtcgggaggggcgggaccagagggcgggagtgccgcaggtgtctgcagcctgaccgcggtctttccttctgccgcaggaggcagtttcgagtgggcggaggatttccccctcctcccccctccaggccccccgctgtgcttctcccgcttctccgtctcgcctgcgctggagaccccggggccacccgcccgggcccccgacgcccggcccgcaggtaccatatcctcggccctgccccctcctctgcccatctctgtccccctatgttccactgccaacttcttgtgaccatctttcaatgtccctgcctctctcttcccagtctcttctctctcccctctcagtcaacagacaccccacccagctctggaaccagctcagaccaggcgacgtccatcagacggtcgtaggcaggcaggccggccgtccccaacccccgagcctcagttttaccttctgtggggattacccccacccccgactcttgcccatctttgtcccatctctgggctcagactccggcctggcacttgccggatcctgatcccacctccgtttggggaacacggtgctcaggggcagacaaggagagagaaacccagagtgctcaaagccggttggtgtgaaccagagcagggaggacacagctgggggttagagagcagtcacagcggcaccgctgctctcgcgtggaccctgcagtgcctcaccacagtttaacccatttaatgttcattgcgatcccatggggtggattctagcctcgtcctcatttttttttttttttttttttttttgagacggagtctcgctctgtcgcccaggctggagggagtggtggaatctacgctcagtgcaacctctgcctcctgggttcaaacgattctcgtgtctcagccgcccaagtagctgggttcacaggagtgcaccaccacgcccagctactttttttgtatttttactacagacagggtttcaccatgttggccaggctggtctccaactcctgacctggaatgatccacccacctcggcctcccaaagtgctgggattacaggcgtgagccaccgggcctggccagtctggtcccaattttacaaaagagaacactgaggcacggagagaagtgaggagctgggattcaaacccacagttgcgcggcctctgagtctgtgccctctccagtagtgaacattggtcaggtttctttcctggcgtttcacatgcgccatatcgctaatcctcgtggccaccttgggagaggggtcatgccgcccctagtttccaacttttagcgatgctaaggccactctgggagagcagggcacacgggcaggtcccagcgcaggactggaacgggactgggctctctgctgccctctgctgccgagccagggaacacccccaggacccagggcttgtgcccagctcggcaggacaggtggtgctccccggtatcagagctaaggtagaagacgccactggagggtttcactcctacttccccaatcttgcctgagtccagatattgtccctgccatttcttagctgtgtgacctggggcaagtcgctttccctctctgtgcttcagttccctcatctgtagagtgggaatgataacaggatctaactcatgagattgctgagggaattaaatggcttaatcctcccgagtatgcagcacagcgcctgtgcagcagcagtctctaaccattagctattattattatttagttagttagtatttttgagacggagttttgctcgtcgcccaagccgaagtgcaatggtgtgatctcggctcattgcaacctccacctcccgggttcaagcgattctcctgcctcagcctcctgagtagctggaattacaggcacccaccaccacacctggctaacttttgtatttttagtagagacggggtttcaccatgttggacaggctggtcttgaactccagacctcaggcgatctgcccgccttggcctcccagctgggattacaggcatgagccaccatgcccggccccattagctattattattattattagctattactgcacttaattaagtcaatgttttctgatcatcttctgcgtgcaggcgccatgctgggcacaggggattcaatgtggagcaagacgggtgagcctgcctggccctccccgcagacactgaccacacactgctatgacaaatgaagaactgcaaactcaggcttgcagagaaagcagatgacaagaggaaagggctttgttttccccttagaagtgtcatttaaggccaggcacagtggcttacgcctgtaagcccagcactttgggaggccaaggcaggcagatcacctgaggtcaggagttcaagaccagcctgaccaacatggagaaaccctgtctctactaaaagtacaaaattagttgggtatggtggcgcatgcctgtaatcccagctacttgggagggtgaggcaggagaatcgcttaaacctgggaggtggaggttgcggtgagccgagatcaagccattgcactccagcctgggcaacaagagcaaaactccatctcaaaaaaaaaaaaaaaaaagtgtaatttaactgggaactggaagggttggttgtcattaactaggtgaaggggaaggggatggcgtgctggcagaggggacagcttgcacacagggcctgaggcaggagagagcttggcccgctcaaggaacagaaggacactggtgtggcttcagggttacttagagtgcatggagggctgaggagagatggcagggggtgcactgaggagctgggactttgtcctgggggtgccagggagccacggacgactataagcaagggagggaagtcaatgttgggtgtaggaagactgctctggggtctcttgggggcagaagggcaagagtgggagctgggaggctggggaaaggctgaggagaggatagtgagccagggctgtgggaatggagaggttggacagggcagagagtcaagggcaggtgggacaggtctgggggctgactcttccttcacttggctgcatcctcaggcttcactctgaatgtcactttctcccttaggccatcatcgcagggcctctgtgaggacagggtgggggtgcattccagggtatggggacactgccaagtggtgagtcagggctgagctggcagggctggcaagcgagaatggcttcacctttaatcaccaggagaggagacggagggtgcaattgtgccaaaccccaaatcctttcgctcagttgacaaatattcctgcggcagcgtgggctgcgagctgctgagcctgtctggctcccaagaccatggtgtgggggcctgaggcgggtcctctcctctgccctgctcaatgtggctctgtccacttagcaaacatttactgggtaccaagagatgccacataccccaaagtctccatgaagcatgaaggtcatgcttcccattaaaagagcgaaactcaagctcagggactgggagtgagggcagtgacttgacccaggcctcccaggtacaaagtacagggtggagcatgagggagcctgatatgaggcccccaacgagaacctgcacctcctggaccttagctttctggtctgtacaatggatggggctttcattctgctcgcccagggaagtcagagctagagtcataggaaagtttggtcggagttcctggggagagctctttccacagggaaaaggtgtgctttgtgccagacgggatgctggggacacagcagtgaccgcagctcctgtcatcattgagcttacattttataggaacaagcagacaggaagcttttccacaaggacagggtaggccaggcatggtggctcacacctgtaattccagcactttgtgagaccaaggcgggcagatcatttgaggtcaggagttcgagaccagccggccaacatggtgaaaccccgtctgtatgaaaaatacaaaaattagccaggtgggctgggcgcgtggctcacacttgtaatcccagtactttgggaggccgaggcaggtggatcacaaggtcaggagttcgagaccagcttggccaatatggtgaaaccccatctctcctaaaaatacaaaaattagctgggtgtggtggcacacctctgtaatctcagctacttgggaggctgaggcaggagaattgcttgaacctgggaggtggaggttgcattgagccaagatcgtgccactgtactccagcctgggcgacagaataagactctgtcttaaaaaaaaaaaaaaaaaaaaatagccgggtgtggtggcaggcacctgcaatcccagctactcaggaagctgaagcaggagaattgcttgaatccaggaggcgaaggtttcagcaagtcaagattgcgccactgcatgccagcctgggcaacagagtgagactccatctcaaaacaaacaagcaaaacccccccaaaaaacaaacaaggacaggttcggccgggctcagtggctcacgcctgtaatcctagcactttgggaggctgaggtgggtggatcacgaggttgggagattgagaccatcctggctaacacagtaaaaacccgtctctactaaaactacaaaaaattagccgggcgtagtcgtgggcacctgtagtcccagctactcgggaagctgaggcaggagaatggcgtgaacccaggaggcagagtttgcagtgagctgagatcatgccactgcactccagtctgggcaacagagcaagactccatctcaaaacaaagcagcaacaacaacaacaaaaccaaggacagggtcatcccagagtgacaaatgcaaaccagtcagagggaaatgagtgagaaagatgagcgtgcaggggtgactgcttgattcagtatggttggggaaggactctgtggaggggacgttgcaggtggggcctgagtcacgtaggaagaatgttccaaaaggccgggcgcggtggctcacgcctgtaatcccagcactttgggaggccgaggcgggtggatcacgaggtcaggaggtcgagaccatcccggctaaaacggtgaaaccccgtctctactaaaaatacaaaaaattagccgggcgtagtggcgggcgcctgtagtcccagctacttgggaggctgaggcaggagaatggcgtgaacccgggaggcggagcttgcagtgagccgagatcgcgccactgcactccagcctgggcgacagagcgagactccgtctcaaaaaaaaaaaaaaaaaaaaaaaaaaaaaaggaagaatgttccaggcagcgggaacagcatgtgcaaagacccaggggtcggaccgtgctgggagcactggaggaacagcaggaggcccagtggctggagcagaggggagaagaggggtaggtgaggacagagagggaacagagcagatcttttgggccatggtgggtgagggctttgcttttccgctgagtgacctagaagccatgaggctgtccccctagtaatttcatttctctgtctcctctgtccatcctcaggccccgtggagaattgattccccgaagacccgaccccgctgcaccctcagaagaggggttgagaatggaatcctctgtggatgacggcgccactgccaccaccgcagacgccgcctctggggaggcccccgaggctgggccctccccctcccactcccctaccatgtgccaaacgggaggccccgggcccccgccccccagccccccagatggctcccctgacccccctgaccccctcggagccaaatgaggcaggaatccccccgcccctccatagagagccgcctttctcggaactgaactgaactcttttgggcctggagcccctcgacacagcggaggtccctcctcacccactcctggcccaagacaggggccgcaggcttcggggacccggaccccccatttcgcgtctcccctttccctccccagcccggcccctggaggggcctctggttcaaaccttcgcgtggcattttcacattatttaaaaaagacaaaaacaactttttggaggaacacggggcctgtgcgtatttcgcgaggtgaggaggggaggatgcagggagcgagtgcgaccctgagaagtcccatcctcacagcctggcccgcatggcagatgggacatcggatgctcagagaagcggaaactcccgcacagtggcggaggcccggcttctctgcttctccagatcccggctctgcgcctggggtttgcatcgcccaaccttggccgctgcagcagcagcactgctggctcaagaggccataaggatgaagcaagagaatcgctcgaacccaggagacggaggttgcagtgagccaagatcgtgccactgcattccagcctgggcgacagagtgagactccatctcaaaaaaaaaaaacaaaaaacaaacaaacaaaaaaccataaggagcccactggggttgggtgggaaggtgcaggctgcggtcagagccacgtttctgcaaggtggcccgcggtggtggccagacgctatcccagggccaggggctagtggggcaggggctcagaaatgagctgctcatgcccacactggatcacgatcacatcccacccacctcaggtcggcactgcctgttccttgaagttcagggtctacctccccacccagcgtggtgctgcctcagtttacctgtttttccatgcgaccgcccacctcgctgacattctcatcccttgtctttaccctaaccgcacctatctgtgtggctctctctcatttccaacattctggctccctgtctcaccctgccccagttttggtctccaactgatctggagttttcctgtctccccatctgagtctcttgctcttggcctcctcctccctgtctaattctatttcgatgtttttg

SEQ ID NO: 1004 - DNA, 14040 bp, Homo sapiens
ggggctgggtcgcctgcgccgagtgttgctgaggctgcgtcttgggtgcgcagctccggcccagcctcacccaggggaacgcctcgcaggtgctcacggacgatggagaggtccgcgcccagggtgggagtccgcgcttccgggtgtgtctgcagctcggggcgctggagggtgggatgtgaccccgagacggcggcggcctggcacgtgatgtatgtgtgtccttgtctgatgtgtcggtgtccccgatggaccgggttccagtcccagctttgccactccccggcttgtgtgccttggggcaggtgactaccccgcgctgtgcctcagttgcctcatctgtacaatgggcatgattaaaaaatacctgtctcagagggcggttgtgaggattgagaggtaattctgtacgtgtaaaacgctgcggacgatacctggcacagactaaatactcataagaataaatacattaaataaactatgatcatgtatcttttgtatgaggcaagtgctgtggttgtgtaatgtctgcgtaaccgcacgggaaacgtgggtatttgcgacccgtgtgtctgtgcgcgtgtctgtgtctgtgttgtgggtgtgtgactctttgtatgtgttatgtgtgccagtgtgtgtttatgtatgtgatgtgtgactgtggtggggttctgtgtctttgtaaccttgtgtgaaaggtgtgtgtatttgtgatgtgtgtgtccatgtctgtttaggtatgtgatgtgtgcaactctgtgtgtctgtgtatttgatctgtgtgcctatgtctgtgcttatgtatgtgtgactgtgtatatgtgcatgttatatgtgtctgtatgtatcagtgtgtggtgtatttatgtgtatttttgcatgtgatttatgtagccctgtatgtatgagttgtgtgtgcccgcatgcatgtgtatgtagtgtgtctgtgtgtatccatgtgagtgaagcttgtgtccgtgtgagtgatgcatgttacgtgtccgtatacatgcatgtattatgtttctgtgtactcatgtatgtgatgtgcctgtctctgtgtagctgctgtgtccgtgtctatgttagttcatgtgatgtgtgtgtctgcgtgtgtctgtgcaattgctgtctgtgcatgtctgtgtgacgtgcatgtatgtgatacttgtgtctgtgggtattctttgttgcccatttgtctagggactgtctgcgtggctgtgactatgagtgtcagcatgtcacagtggtgtccgtggggatctttgtctgtggcgtgtgcgtctgtggatctggggctttactttgtccggggcatgtgtgggtctttgtgatgctttgacgttcctgcgtggccgggtgcatctgtgctggaagctggcctgcctgtgcgtttccagtgcggtccctgcgtctttgtgtgtgacgtgtacgtgtccccgtctgctgatggctgtccacctttgtatgtgatgcgcttgtctatgagggtccctgcgacgtgtgtcagctgtgtgtgggctgcgcgtgcctgacatctgcatcttagcgtgtagcacatgtgtccatgctggtggcatgtcacagcggtgtccgggccaggcacccgtgggccctgcccccccacccccgctgcaagtgtgtgccggtccctgtctgtccctccccctcccatttcctcccctccctcctggcagccaatgctacgggggagccagttgccatgacgacgctccatcctccctcctcccacccttcctgtgacaggctctctgctcccccaatcctggctgccctcgggggcggggccctctttctcgccccccccatcctaccctctcccccccaccccagcaaccccggctccccagcatctctcctctgtccgcctctccatcccttcatccgtctgtcccttcaaagagggggaggggggtacctgagccagcaagcagcccctccctccccctgtcctgcgtctcctgcccctctcctgggccgggaggaggccagggtcgcgcgggtccccatggctgggggctgagggcccgcccccccctcctccccagccgccaccacctccacctccctgccatcctcgacaagatgcctgcccccggcgccctcatcctccttgcggccgtctccgcctccggctgcctggcgtccccggcccaccccggtgagtctgtcgggccatcagtctgtccggtggcccccacccccgcggcggcctcgctgtctgcccaggggtctgtctgcgggtcctgccccgtcacctggtgcgcgtcttcccgcagcccagcagggcccggagcggcggggacggtgcctctgtcagcagggcctgtgggagggaggctgggggctgggtggggagggggctccgtttgggcaacatgtgtgtatgcgtgcacgcatgtgtttgtgctggtgtgtgcaggaagaaggggaaggacagggcctctgggagaattgggggcagaggacaggaatactatttctaagggggacacaacacgggaggctgtctctggcttctggagagacccagggcttgcggagttcccttctctgggtcttgggctggggatagagaacatcggtgtgcgccaagcgtccctaaaagagacagatctcaaccccacaaactggggggttccagcatggggcaagaatcttctcccagcctgcagctgagagctagtcctcctccccaacgaggggtaatgaggctgtccacgggagcgtattttaaattctgcaagctccagacttcactatcactcctctttccttcaaccctcattggaattcatccaagcctggggtgaggggatggggtgggatgaggtggcgggggtcccagtttgggacgagaagagagaccccacccccaatccaaccacttgggaaggccccaaactacaactcccacaatgccttgggccactctgcacctctgccaagggaccctggtcgcagagcatcacgggagttgtagtccaagacgtgccgggacgggagggggcatgattccggtatccagggacttgaagctgggaccccagcccagccctgtgcccacagatggattcgccctgggccgggctcctctggctcctccctacgctgtggtcctcatttcctgctccggcctgctggccttcatcttcctcctcctcacctgtctgtgctgcaaacggggcgatgtcggcttcaaggtgaggtgcatgaggggattcaacttggggaggaagactccagcaaggcctttaccccctacacaggtggttggtggggagaagggggcagtaaatccgagagcaccttccagcttgaagctatggcaagatctggagccttgggatggggaaatgggggatggaaattgggctgggactgggagacagttacaaaaatgaaggggagacaaacttaagagaaagacgatggcgtgtctctcagccctgcgttctcccacccctcttctcctctcctggccccaggaatttgagaaccctgaaggggaggactgctccggggagtacactccccctgcggaggagacctcctcctcacagtcgctgcctgatgtctacattctcccgctggctgaggtctccctgccaatgcctgccccgcagccttcacactcaggtactgccccacgccatgaccagcatcccatggtgtcccgggaaaggccagaagatgttgagtgtgttccttcaggggctggggcggttgagaccagcggcagccaatgggaaaggcataggtgggagcgctggaatcttggaagcagcctatggggaggcagacaaagatcatcttggtggaagccattgcttaatccaaaaccagatttggggatttttaaggggcaagcggtggtgagattaccatagagcacagtctcagaggcagccaatgggaggctgaaatcacatcataggagcttgggatgccaaaaggaaggactgattggatgctggagccttgtgagcagccaatgaggaagctgagattctgacatggaatgtgggtggcagccaatgaaaagagagtgatgtctgctctgtctcagtccccactgacctggggtgtgttggtagcactcaggaagggggagagactcaggggctttcccctcttgccctccccagacatgaccacccccctgggccttagccggcagcacctgagctacctgcaggagattgggagtggctggtttgggaaggtgagtgggctggggaggggaggcagggctccatggatcccgagctgtcctcctgttctgtgtccacacccctgctctcaccacttctcatctgtccctcgcctcctccccatgccccctcagcctcccatcccccctccgtccacctctcaccggctcccacccgccccatccccgacatctgtcagtcagcgcctccctcctcactccattgaccactccgccgcgccacccggctctccacgcgtccgtccgtctgtccatccttccatccgtccctgcgtccatcggattctgggcccgtgagtgtctcaccccatgtctggtgggggtcaagggtggtgggatgtggagggagaagctgggaaggagccgggggttgggagctgtgtggtggagtggagctggtcccaggggacggggctggggaaacggcactcgctgactcctgggtgccccttgaccaggtgatcctgggagagattttctccgactacacccccgcccaggtggtggtgaaggagctccgagccagcgcggggcccctggagcaacgcaagttcatctcggaagcacagccgtacaggtactgagggtttctcagtgggtgtgtgccttgttgaggtgacattcaggagtggaaggagtgctgtatggggtcacacctggaatctacctcttccggttgtgcagctctggcaggagaacttccctccctgaacctcaggttcttcctctggaccgagctaagggtgggaagtgagaggcaggatggtggaggaggcgggagcacagaagctgagctagaggcctgctcctctcccctctgaacctccggatcttcatctggaaagtgagtccaggaagccctagtgtcctcatgaagagggcagctgagaggatgtgagattcccatgtccaatgttgggtaccagctggtacttcccttccccaggccacagactaggtccctgagcaggtgcccgagcaggccactgtggagctccatccctgcccttcttggtctctactccactctcagtgcttctaggatggggtctaggtatccatttgccagataaattccttgtgaggtagtgagttccctgttttggaaagggtgtgttcgcagagaccccttatcagaacagttgtaaaggtgggctttaccctgagaaacacattgggttttggcactccctcactccaaaacctcccatggctccctactgcctacaggacacatctggtcctcctgacagcccacaggccctgcgcagtctgacactgtcccttccttccaatgtccccctcaccccagccacgctggcctcttcactgaccctccccacggaagccaattccctgccgcagcgcatcggaccttgctatatcctctctagaatatcactccttgctcatccccaggtgtggatggggccccttcccttcctcaggcctcagctcagagacatcttcccttactcctcccctccttccaaagagggtcctggggtgcttcaccccgtcatggcatgtgttttcttcataacccataccccaggttgtcactatatcatttgcttacttgcttattgcctgtctctccctaaacctgtgccagcaaacactggccacatatgcctattacatttaagctaagatgggcacggtggtatactcgtgtagtcccggcactttgggaggccaaggtgggaggatcacttgaggccagaaattggaggatggagtgagctatgactgcaccactgcactcccacctgggcaacagagcgagaccctgtctctattatataaataaataaataaaatgtaagctaattaaaatgcaatcaaattaaaaacacatttcctcagccaccctcatcatatctcaagtgctcaatagccacctgtggccagtggctcccctggtaggcagggctggtccagaagattcccaccttcgcaaagctctgttggacagtgcaggtctctactagcagcagctcagggtctgtctcgttacccgagcacaagtgctgctggctctcagtagacgtttgctgggcgagccacagacctgagatcaaatcccaatgttcccatcattaccagctgtgtgaccctaggcaagtcgcttcacctctgttccatctggatcaaatggggatcatcatcctgcctagcacgttgctgggaggatttgagagcagagcggccggccttggccagattcgtgggtgtgcagtgaatcctggcttccttctacaccagccaccccaagtctcccatgctgggaactccagccactgttgaagccccacacatggcaggagcttcatgaacactttgtcgggctcctgcctgtaatcctagcactttgggaggccaaggcgggcagactgcctgagctcaggacttggagaccagcctgggctaaaccctatctctacaaaaatacaaaaaaattggccaggcacggtggctcacaccagtaatcccagcactttgggagactgaggtgggcagatcatgaggtcaggagttcgagaccagcctggccaacatggtgaaaccccatctctactaaaaatgcaaacattagccaggtgtggtgggcaggcgcctgtaatcccagctactcaggaggctgaggcaggagaattgtttgaaccccagaggcagaggttgcagtgagccaagatcacaccactgtactccagcctgggagacagcgtgagaaaacaacaacaataacaacactttgttacacgattcttccaccaaacagaagcaagagaccctgttctcctgaggacacacagcataaacagcagagccgcggttacacacaggcaatagaaggctgggtactggcagtggccccacagcacacaagtggctctgcctcccgccaggccccagtaggaaaataactagtaagttactgtgcacctactcctggccagaccctgggctgcaagcctgaaatgttctcatcctcctgcagacctccaagccagtccttctctccacctgtgtttattgagcatctactactagtctaggcactgaggacacaggcaggaagacacaccaaattcttatcctaggagagctcaccccctagtggagaagacacacaatagataaataaatactttttttttttttttcaaggctcacttcagccttgagctcctgggctcaagtgatcctcctgcctcagcctcctgcatagccaccatgcctggctaacttttatttttatttatttatctttttttttttttcagatgaagtcttgctctgttgtcaggctggagtgcagtggcgcaatctcaactctctgcaacctctgcctcctgggttcaagcgattctcctgcctcagcctccagagtagctgcgattacaggcgcccaccaccacatctggctaatttttggtatttttagtagagacggggtttcaccatgttggccaggctggtctcgaactcctgacctcaggtgattcacccaccttggcctcccaaagtattcggattacagacttttttttttttttttttagacagagtttcaatcttgttgcccaggctggagtgcaatggcggggcctcagctcactgcaatctccgcctcccgggtgcaagcaattctcctgcctcagcctcccaagtagctgggattacaggcatgtgccaccaagcccagcttattttgtatttttagtaaagacagggtttcactatgttggccaggctggtctcgaactcctgacatcaggtgatccacccatctcggcctcccaaagtgcagggattacaggcatgagccactgcacccagactatatattttttttaattgtagagatggagtttcactatgctgctccagctggtctcaaacttctaggttcaagccatcctcctgcctcggcctcccagagtgctgagatttcaggtgagagccaccagaccaagccagaaatgcattttaaaaagagaaactgtcagctgggcgtggtggctcacacctgtaatctcagtactttgagaggcccaggcaggcggattacctgaggtcaggagttcaaggccagcctggccaacatggtgaaatcccgtctctaataaaaatataaaaattagccaggcatggtggcacatgcctgtaatcccagctactcaggaggatgaggcaggagaattgctggagcccgggagatggaggttgcagtgagccaagattgcaccactgcactccagcctgggcgacagagcaagactctgtctcataaaaaaaaaaaaaaaaaaaaaaaaaagagagagagagagagagagagaaactgtcagagaatgacaaataccatgagaaaatgaggcagtatgtgacagagacaggggccaccttggataggaccatcagggaggccgggttgacttggagaagtcagccatgcaaagcaccatgggaagtacattccaggcagaaggaacagcaggtacaaaggatgtaggacaggaagaagctcatggagagtgagcagccctggaaatacatttagaatgcagggtgaagcctgggcacggtggctcatgcctgtaatcccagcacttcgggaggccgaagtgggtggatcacttgaggtcaggagttcaagagcagcctggccaacatggtgaaacccattatctactaaaaatacaaaaattagccgagtgtggtagtgtgtacctataatcccaactactcggagttgaggcaggagaatcacttgaacccgggaggtggaggttgcagtgagccgagattgcaccactgtactccagactgggcgaaagagcaagactctgtcttaaaaaaaagaatgcagggtgaaaataaaatcaaataatatgttgccattaaaacagcagtaattgctaggatctcagcacataccagcttctctcagatctcatgtaattcctcagaggaagttgttatcgctgtcccatttttacagatgaggaaaactgaggcagggagcagcgaagtggcttgcctgagatgacacacctaggaaagtgggagtcagggttcaaacccccgagtctgactctttcccacagcgtgagggtaaaggggagggtatccaacctggcattgggggggcagcaaagcttcccggggagatgatgttgaggcagaggcccggaggggccaagagaactctgatgagaggagggcgttctgcagagagagaaccgtaggtgcaggcagggtgcggtggttcacgcctgtaatcccagcactttgggaggctgaggcgggcgtatcaccggaggtctggagtttgagaccagcctggccaacatggtgaaaccctgtctctactaaaaatacaaaaattagccaggcttggtgtcgggcatctgtaatcccagctactcgggaggctgaggcaggagaatcgcttgaacccgggaggtggaggttgcagtgagctgagatcactccattgcactccagcctgagtgataagaatgaaactccctctcaaagaggaaggaagggagggagggagggaggaaggaaggaaggaagggagggaggaagcaaggaaggaaaaaaaagagagagagagagagagagaaaactgtaggtgcaaaggcccgggcctaagcaagggcctgcaggtttgggaaaacccacatgggataaagctgactcttgggccagccggaggagcaggaggaatcaaagagccggcgctctatcctggggtgctggggatcgacagagggctgtgtgtggtgaaaagcaggtgaggcaaagggaaggggagagactagagccagggaggctgggaggaggctgtggggacgaggaggagaagactgagaagagtctggggcaggaatgaaggtggaggtgaggtgtaaggaggaaggagaggtaaaggggtccctggggacctgctcccccaggagcaggccagtgagggccatccagagatggggacctggggaaggagtggggtgtggtcgaggagagagactccgaggtgaggaaactgagatcaaaaaggtagagtgggccgggtgcggtggttcacgcctgtaatcccagcactttgggagcctgaggagggtggatcacttgaggtcaggagttcgagaccagcctggccaacatggtgaaaccccatctttactaaaaatacaaaaattagccaggcgtggtggcgcatgcctgtaatcctggctactcaggaggctgaggcaggactcccgcctgggcgacagagcgagactccgtctcaaaacaaacaaacaaacaaaaacaacaaaaaagggtggaggcagcagtttggttctgctgggggttggggcaggatgaagaggaaggggctgccttcccaactcagccacctcctcactccacaggagcctgcagcaccccaatgtcctccagtgcctgggtctgtgcgtggagacgctgccgtttctgctgattatggagttctgtcaactggtgagggtcttggggggttggggaagggcagagggggcagctggacaaggccggggccaagcctggtgcccctgggcttcgtcgtcatcatcatcatcatcgtagatgatgtgtggcatgcgctaacatttcatgagtgctgcctgtcctgggggctggcctgaacaagcaggcaagatgggctgtgttattacctgctgcaagcagcagaggaaactaaggctcagaggggctacccagtgacagcagaagccattccagcctccgggccgactagctggagacctgagcggctggtggtgctgaccttctttgcctccctcccagggggacctgaagcgttacctccgagcccagcggccccccgagggcctgtcccctgagctaccccctcgagacctgcggacgctgcagaggatgggcctggagatcgcccgcgggctggcgcacctgcattcccacaactacgtgcacaggtgggcgggccggggagccgcgggaggagctactaaggggaagggggaaggaggtgaggcctcaggggaggggctagagggggggcggacccatgactggctgacacaaaatagggacgaaccgaggagggtatggaggagaaggggccaggagaggaggcgggaccaggaggggaatgagaggaaccaagtgagagggaggcggggtcaggtgatgaggggaagggccaggagaggaaaaggggtcaggagaggaggaggaggaaccaggggagggggaggggtcaggggaggaggaggaagaaccaggataaggggaggagccaggagagggggaggaggagccaggagagggggaggaggagccaggggaggggaggggccaggagagaaggaggaggagccaggataggggagggtccaggagagaaggaggagccaggagagggaagaggagccaggggaggggggcaggggagggggaggagtcaggagaggaggagggtccaggagaggaacggaaggagccaggtgagggggaagcagggtcacgtgatgaggagaggtggctgggagaggagggggaggagtcaacagagaagcaggagaagccagaagggtcagatgaataagaggaggagccagtgcagaggaaaaggagaggagacttggaggaaccaggggtggggagaagacaagacagcaggggagagtgaaagcagtcagaggggagagacagatcagagggaaggggcagagtcagtgtggcggggcagggtcatgggaggggtggagtcagtgtgaaagggcggggtcagggcgtggctggagggctgcccctgcgctcacctcctcgcgttcttcccgcagcgacctggccctgcgcaactgcctgctgacctctgacctgaccgtgcgcatcggagactacgggctggcccacagcaactacaaggtagggcttccttccgtcgggatgggggctgtggggtgccctgacccgcctgacaccgccctggttccctcaggaggactactacctgaccccagagcgcctgtggatcccactgcgctgggcggcgcccgagctcctcggggagctccacgggaccttcatggtggtggaccagagccgcgagagcaacatctggtgaggaccacgggccgcgggggccgaggcaggccaggaaggtggaagggttactagatgccaccggttctacagatggggaaaatgaggcccgggtgggtcagggctgggctctgacctctctctgctctctgcaggtccctgggggtgaccctgtgggagctgtttgagtttggggcccagccctaccgccacctgtcagacgaggaggtcctcgccttcgtggtccgccagcagcatgtgaagctggcccggccgaggctcaagctgccttacgcggactactggtgagggctagcccacccggggctcctggcctgccgcaccccacccaggatggtcccagcatcccccctcgtttcccacatcacccacatcccgtttgccctccatacccctcaagagtgaagaggggctgtccccaccctttctgccagcatctgctacttgcagggggacacaggcaggggatggcagagctgtgatttgaacccacttcaccctaagaggtccctgcttcttacctgtctgattccagagctcacagcgcaaacagggacaccactaccctcaccagccgttcccatctgctgctgtgtcccctctgcctccaggtcccgtcagcctctctctatgggcatcttccccccacccctgcttctttgggtctcaatacccagctccccagcccagttacctcctctgaatctctaccgtctgctgtcccctcttctccctggatctctgccccactttttgggtctatgtttccctctctctctaggtctctgtccccctctctctgggtctctgtccctctctctctgggtctctgtccctctctctctttctttttttttggcagatttttgcttttgttgcccaggctggagtgcgatggcacgatcttggctcactgcaacctccgcctcccgggttcaagcggttctcctgcctcagcctcccaggtagctgggattacaggcaggtgccaccacgctaggctaattttttgtatttttagtagaaacggggtttcaccatgttagccaggctggtcttgaactcctgacctcaggtgatccaccggcctcagcctcccaaagtgctgggattacaggcgtgagccaccacgcctggatctctgtccctctctctctgggtctctgtccctctgtctctggatctctgtccctctgtctctgggtctctgtccccctctctctgggtctctgtccccctctctctgggtctctgttaccctctgggtctctgtccccctctctctggttgtctgtcccctccctgggtctctttcccctccctgggtctctgccctgctcactctgccccacctctccccaggtatgacattcttcagtcctgctggcggccacctgcccagcgcccttcagcctctgatctccaattgcagctcacctacttgctctccgagcggcctccccggcccccaccgccgccacccccaccccgagacggtcccttcccctggccctggccccctgcacacagtgcgccccgcccggggaccctctcctcaccgttccccctactggatggcttccctggagccgaccccgacgatgtgctcacggtcaccgagagtagccgcg

SEQ ID NO: 1005 - DNA, 2232 bp, Homo sapiens
tctttttccctctgaccgggtttgtctttgtggctctgatctcttggccttgacctgtcccccatcaccttggtaccaggttcactggtgtatttgcgggatgtagtctggatgcggggagagggaaggagcaaggggtgggaacccagccccttccctctgttagggaggctgtagtgtagactctggcctcggagttaaggtgatggcggcattagggtcacatgtgagtcctgggggattggggaaagggagagagaggataaggttttagcttcttcccaataagtcctgctgggagacttggtggtgcttgaagtgatcctgagacacctgccacagggtgggtgggtgctgcatgaaccaaggcagcggggggaaggtgagagctggactttctgggtctgagggaggaagggctggtgactgggggcaggacttctgggtctgagggaggagggggctgggcctgaactcctggatctgagggaggaggggctgggggcctggactcctgggccttagggaggaaagaccagggcctagactcctgggtctgagggaggaggggctgggggcctggactcctgggtctcagggaggaggggctgggggcctggactcccgggtgtgagggaggaggggctgaagcctggactcccgggtctgagggaggaggggctgggggcctggactcccgggtctgagggaggaggggctgggggcctggactcccgggtctgagggaggaggggctgggggcctggactcccgggtctgagggaggaggggctgggggcctggactcccgggtctgagggaggaggggctgggggcctggactcccgggtctgagggaggaggggatgggggcctggactcccgggtctgagggaggaggggatgggggcctggactcccgggtctgagggaggaggggatgggggtctggactcctgggtctcaaggaggaggagatgggggcctggactcctgggtctgagggaggaggggatgggggcctggactcctgggtctgagggaggaggggatgggggtctggactcctgggtctcagggaggaggagatgggggcctggactcctgggtctgagggaggaggggatgggggcctggactcctgggtctgagggaggaagggctggggcctggacttctgggtctgagggaggaggggccggggtccccaactcctgggtctgagggaagaaggggctgggcctggactcctgggtctgagggaggagtggttagttatctagggctgacataacaaagtacctcaaaattagtggcttaaatcacaaaaactgaaggtctcccagtgctggaggtcagaagtctgagatgagggtgtcagccctggctgctcctgaggctgtgagggaggatgagtccccggtctctggcttctgagggtgtgccggcagctttggttttcctcggtttgtagaggcgtcaccccaatctctgccttcacctccacatggtgtcatttctgtgtgtctgggtctctgtacaaacttttataagacacacatcctattggattagggcccacatgaatgacctcatctgaactaattatatctgcaatgaccttatttcctaatcagatcacattctgagatgctgggggttaggattttaatataaagttttttgtgggggtgggggagacacaatttgatccgtgctgagtccattttgtgttgctctgacagaagacctgaggctgggtctttataaaggaagaggttgatttggctcagattctgatggctggaaggttcaagactgggcaggtgcactcactgaggacctccctcatccctgaggctgctgctgcttctgggggagggcagaaggatgcagctgtgtgcacagagatcacatggtgctgaaggaagcaagggagagaaaaccaaattcccaaattcccaagggtgagcactcactcaccccttaaggcaggcattaatctatccatgaggactccacctccaagaccacacagctccttatgaggccccacatcccaacacctgccacactggggctcgaatctcaacatgaattttagtgaggacaaacgatatccaaaccattgccacccaaaagaagtgggctgaggcctggcgcggtggctcacacctgtaatcccagcactttgggaggctgagacagatggatcgcctgaggtcaggagtt

SEQ ID NO: 1006 - DNA, 7374 bp, Homo sapiens
cagggtcataccctaatcaagcttgctacaaagatcataccaactgctgttaccatggagcacatctcagagaaggtgtctccgtcaggaaacatctccagtgcacccaaggaattttctgtctatgtaagaagctatctaaatttgtcattcagattggcctgatagaaggtggttggctaggaattaggggctgtcctctgaactaggacagataactagttgtgtcacttatttcctggacttctgctttctcacctacaaagagagagagttggaccaaatgatttatattattatttttacttttatcaaagttatacatgtataagtaaaaatcaaatatttccataaagtttgtaaagaaacagtaattccttgtcccacttctccacatctccaattctcattatcccaaagcttctacttgcaacaattttagatgtttatttgggtacttgcctccatgttggcttttgccattatttcctgatttttcagttttgattatgacatcctctcattgaaaatgaagattaactcttttccatggcacttccatcttcccaaaatatttatgtcttaatttaaaaaacaaaacaggtttctggagatgtaattcccataacaattaattcacccatttaaagtacacccttcagtggcttttagtgtattcacagagttgtgtatccatcaccataatcaattttagaacatttttcttaccctaaaaagaaaccccataccccttagccgtcacctcctattcccctagtgtactcctccagcccctggcaaccactggtctactttgtctcaataaatttacctattctatacatttcatataaattgaatcatttataatgtgtgatcttttgtgaatggcttctttaactttgcatactgttttcaaggttcatttatgatgtagtatgtctcaatatttcatttattttttattgctgaataacatttcattgtatggatatatgacattttatttatctattcatcagttgatggacatttgaattattttcatttttttggtcattatgtataatgcttcaacaaacattcatgtacaagtttttgtgtggacatgagtttttgttttccttgggtgtatacctaagactggaattcctagatagcatggtaaatgtaggtttaacatttgaggcactgctagaagactgtattatctttttgttcaagcaatactcaatgttttcacagtgactatgtgaacaaaacagctctcagttgagctatttagtgtacttaaatactactttcttccatttttttaaatgtttctgagtgtaataattgctttacattttttttttcttgagacagggtctcagctctgttgcccaggttggagaacaatcacagctcactgcaacttcaaactcgtgggattgttttttaaattttttagtagagataagggtcttattatgttgcccaggctggtctcaaactccagggctcaggatcctcccgccttggcctcccacagtgctgggattacagacgtgagccactggtgcccagcctatttttctttaatttgcttagttttctgcattcctattactaaaactttcccaaattcttcttcagaagtacaaatattcccccattatgttgattcacatcagataacttataaatttcttcctttctttattccttccttcactttcttttcatttattttcttttttttttcccaagatatccctctggcgccctcagcattttgctccagccttgttaggtaggcctgatgcacaactgttgtcgtgggatttcactcatgcatcctgaggattcaacttactgtctaatttattatttttaaaaagtgtttcttctttcccttttctgctttttgttccaccttctggaagatcatatcaattcacattttaacccctctacggaaattttcattcctgctgtcatgattatactttctgagacttcttgtttctatacatattcccttttttagagcctatatttttttcttttatgaaggcagtaccttctcttatgcttctgaatatattaactgtaggcttgtctcattttcttctgctcgcttccgggtctggatttcctagccccacttttcccccttgcgggtagcgtctctctgtttcctgtacaacacttttctcccatgtctgtgatgcttgtcacatgaattgctaggcggtgcaaagccggcaggaagctttgcgcgcacggtggggctcatccgtcgtgagtttgcagcgggaatcatctggtcgggccatttcgtcgggagtcacaagtgtgctatcaggagagctgaccctgagaggactcctgcagtgcacaggaggtgccagcctggcccaccacaccatgagctgctggggagaggagggccgcggggtcaccactttgtgcagaggccatgctcttgtgggcggttctggggcggcgccggcagtggtcttagagatgggaggaagaagagagccctctgctgggccaggcggggctggaggggcgtggaggcgttgtaactgctttttgaaatgactgttagctaagccgcagatttgggctcctttcccccacactccccctcacgctttcacccacacgctccccacatggacaccctcctccggccttcctgggaacctgccgcttaagtcctgcgctgctgggtccacgtacagcccgagtagtttgtgttctttctctccaggcgccatttggccatcttcactttttggtttttctgtttgtttgttttggggtttgttttgttttgttttgttttgttttttggttttactgtctactcccacttttgccttatataggtttatgccttcaattatgatcttcccatctggaggagggccctgggttaaacagcctgccttatatgtcacccaaatgcctctacattccatatctggagtttcaaaacaaagggctgctgtcctttcatagaagcccacaccacctgcaagtggtgtctctgaaaagttgagtttgagcagctaagttccatctcagaaaggtgaacacgttcattatttagacaaattatgggtgaatcccaaaggcaggaatcctttagtaataaaaactgcttctcatcattttcttctacattaaagaatttatgaaccaagtaaaattaaaacaaggtgataaaaggactgggcgcagtatctgctcctgtgatcccagctccttaaaaggctaaagcaggaggatcactggagcccaggaattcgaggccagcctgggcagcatggccagaccccgtttttttggtttgttttgttttgttgtttatttgttttttattttaacttttattttaggttcagaggtatatgtgcaggtttgttatacaggcggtaagtagtaatacccaacaggtatttctctgctcctctccctcctcccaccccccaccctcaagtagatctcagtgtctgttgctccgctttgtgttcatgtgttctcattatttagctcccacttacaagtgagaacatagagtatttgtttttctgttcctgtgttagtttgctgtggataacggcctccagctccatccatgtccctgcaaaggacacgatcttgttcttttttatggctgcatagtattccatcagatcctgtttcttaaaaaaacccaacaaggtgataaaggaggtagaaataaaactagcactcctgtcttaagctaaagagaatatatgaggcttgagtcatgtgtacatatgaaggggtggcctgcccctccccacctgtgggcgtttctcgtcaggtggaacgagagacttgagaaaagaaagagacaaagagacaaagtatagagaaagaagagtgggcccaggggaccagcgctcagcatacggaggacccgcgccggcaccagtctctgagttcccttagtatttattgatcattatggggtgtttctcggagaggggggatgtggcaggacaatagggtaatagtggagagagggtcagcaggaaaacatgtgaacaaatgtctctgcatcataaggtaaagaaaaaagtgctgtgcttttgatgtgcatatacataaacatctcaatgccttaaagagcaatattgctgccagcatgtcttacctccagccctaaggcggttttctcctatctcaggagatgggatattcaatcgggttttacaccgagacattccattgcccagggacgagcaggagacagatgccttcctctgatctcagctgcaaagaggccttcctcttttactgatcctcctcagcacagaccctttacgggtgtcgggctgggggatggtcaggtctttcccttcccgtgaggccatatttcagactatcacatggggagaaaccttggacaatacctggctttcctagacagaggtccctgcggccttccgcagtgttttgtgtccctgggtacttgagagtagggagtggtgatgacttaacaagcatgctgccttcaagcatttgtttgacaaagcacatcctgcacagcccttaatccatttaaccttgagttgacacagcacatgtttcagccagcacagggttggggtagggttacaaattaacagcatctcaaggtagaagaatttttcttagtacagaacaaaatggagtctcttatgcctacttctttctacgtagagacagtaacagtctgatctctcttttccccacatacatatataattgtgagtacattatgtaaccatgatgtatccaactcttttaataaaaatgttatagtttgatattaatatttttattataaaatgatttaatgaatgtactgtttattttgctgtgttacaatttaaggaacctaacaataaacttcagattcacaaaataaattagtttgcaccagtgcgttatcctctcacaaatcttcaatttgaagggtagagaagaacaaaaagcacaagagaaattgcatacaaagaaaaaaatcagtgtttttgtcagtcaacgggagcttacttttcagaggaaattatttgtgtgatcaaaatctggcaatgggcttatgtttatctcattttggtaaacatcagttcagtatggcgacgcatttttattttattcaaagtatgcttattgcaaatatagttatcaggtcaaagttaatgttgggatttgctctatatgtatgtatctgtcttccatctatcagctgtttgtcaatcatctatcttctaactatctatctatggatctatctatctagctctctatctatctatctatctgtctgtgtgtccatccatcttctatccttttagtcagtcccgtgatcagccttgggcctcattgaccccttgttaaatatcctctgggtgtataggttagtactggcatgatcacagcactgtgcccctggtggacacacagagatatttggtgaattgttggttctttttgaaaacacaactgcatccattcattacaatctctatatctgttgctttctttatagggcatcacaaaaaaatgtgaaggagaagaaattttcctaggtcagtttatatataacaaaacaggaaccaccgttcaaacatttgaactccaggtaatgtatgctctgggaaatgatatgagtagctctatcactgggagaaatttgttgggattgcttcatgtaaagtgacgtatgagaataattatgacaaaagcgtgagttacacaaggcttatctgatcttcaattctgagctcgaagtgcttacgaggattttaatgcaaaagacagacaaatgcaaaagcagtttctaagtcaaattcttcctcatctgctatcacttttttataatatatatatttaatttcttggttctttcttaactattccattccctgaatactattaagtgtaatagttactacctcaccttgcttgagtataggggaggaagatgatggtacaatatgaagtggacagaggcagagagaagctcaaaggaatagaggataaagatttaatatcagataatacaagtaaaactcctaacccagtgggagaaaatatcaactgttagcttataaatcccctgaaactcaccaaggcaaatgaaatatatcctcattttttaaattagccacagggagtaactgaagagatgtagaagacattttatatcatgtaaaaacaagtgttttatgacactttttggccaaatagtgagaaaataaaggtaaaacaatacatatatgttagaaatgagcatatttgtagagcttcatatttgattatgtattcatatgcatttgggctcatattatctgttcttatagttggcttcatagttctggtttttagacaacaagccctcttgcccctgctcctcggcacagccagcaaggagtgtagaggggggaaacagcggaatagagaggtcacttggccgccatattatcctcctctccctctacttatcttttcataagctctttattccagtagcttattttctcattcattagactgatatttgaaaatagttatgttagaaaagaaaaagtatataggccaggcgtggtggcttacacctgtaatcccatcacttttggaggcctaggcaggtaaatcatttgagccctggagttcaagaccagcctgggcaacatggcaaaaccctgtctctacaaaaaattaataaattagctaggtgcggtgcgtgtgcctgtagttccagctactcgggggtctgagctgggaggatgacttgagcccaggaggtagaggtggcaatgagccatgatcatgccactgcattccagcctgtgtgacagagccagatcctatctcgaaaaaaaaaaagtatataatttaaaattatatcagtattcattgggattctttgagatgaatttcgttataaggcattgattttcttttctttattttcagcatgcagtttctgaatatttattatgtgtgaaacttaatatctttagcaactggggacacccgaagtatacttgtttatatcgattcagggtccatggcacaccaggcaagcacatctagaagagttggtacagaaggccatgccacatgtccagaatattcaagaatgcttattctcttagatgataccgcacccataggaattgagaattgggagtgggaagaaaacctcaaagtggttcatacttgcctgtaaaaagtaaatgcattttactaataaaaaaatatggaagtaaattaaatatccttgccatagtttagtctttaaggatgcttcatgttgttagagcattgaaaactcattttgtatttagaagaagatag

SEQ ID NO: 1007 - DNA, 923 bp, Homo sapiens
gatgacagcttcatgtgtgttactgcccctgaagaagaccttccagtgggacaaaatgtggaggtggaagacaatgatcattgatgatcctgaccctgtgtaggccgaggctaatgtgtgtttgggtcttagctttcaacaaaaaaagtttaaaaagtaaataaaaaatttttaaaatagaaaaaggcctatagaatagggatataaagaagaaaatatttttgtacagctgtacaattttttgtgttttaagctgtgttattacaaaagagccaaaaagttataaaattgaaaatacagttaaagtaagctgtttattattgaagaaagaaaaacattttaaaataaatttagtgttgcctgagtatccagtgttgataaagtctacagtagtgtacagtaacatcctagggccttcacatttcactcaccgctcactcactgactcagccagagcaactttcagtactgaaagccccattcgtggtaagtgccctatacatgtgtaccatttttaatcttttttatacagtatttttactgtatcttttctctttttagatgtttaaatacacaaataccgttgtgttacagttgcctacagtattgagtacagtaacaatgatgtacaggtttgtagcctaggagcatagactataccatctaggtttgtgtgagtatactctgtgatgttcacacagtgaagtcacctaacaatgcatttctcaaaatatgtccctgtcattaagtgatccatgaccgcagttgggagaagtttcctctgttttctgaaggagtttatatatacgtgtatatttttcaaatgtttaataaaatttaccagtgaatccagggctggattttatttgtgggaaaggtttttattgtgaatttgatttaactagagctgttcaaattctcta

SEQ ID NO: 1008 - DNA, 923 bp, Homo sapiens; identical to SEQ ID NO: 1007

SEQ ID NO: 1009 - DNA, 923 bp, Homo sapiens; identical to SEQ ID NO: 1007

SEQ ID NO: 1010 - DNA, 2651 bp, Homo sapiens
tgacattgtgccactgcatttcagcctgggtgacagagtgagactctgtctcaaaaacaaaacaaacagaaacaagaactctatgttgagaaatccatactagagggtttaatttctcactttgtgtgctagtgattaataaatttcaagcttatcacacagccagaaatgtcgcctgtgtttctacaataaaagatttgggaatattgtgacattttttcactgagccttctgggttcattattaagatataacaattttagaagacttattgagataggtatactttttaaaatttggattcaatatatcaagctcagcattttgtcttttttttgttttgttttaaacaactttgggtttacttgtaagagtatttcagtggaggaaaagtatcagaagtttagcactgagtgcctgcctaactattttatgtcttctttcatgatgatgcttaatctcaacataatgactcagtttaccattgtaaactctttgtaggatgtcactgattttatcagtcatttgttcatgcagctgggaactgtggggatatatgatttgccacatctgaggaacaaactgggtgagctccattgaaaaatttctaactttcttattaaaagcaagcttcctcacttcctgatggcttatgcaaattaatgcctatttattcatcagagggtgactggagagattatggttttcttatgaatttcttgcttgagcctgcttgtctgctgtttctaagttgtctgcactattttatgtgagtaattttctactttattatgttctgttttcacatgtcaaatcagctctcccaagaatgctacttgtaacctaagtagacgtgaaccgaaaagggtaaagacccagctaaaaaaaaggttgactcaagttcagttcacattcgtaaagtagttaggctgccttaggttgcttattcttttcttgaaaagaatccctcaagagagaaacatgtgaggccacagcagcttagatctgtcttccacagagaaggtggcttttacagagaaattgacatactcatcacttatctgacatgacccagctttgtaaaactggcttctattaaaatagtcttaatagactattcactgaggaggagagaatcttattcactctttacattctcttcacattttcagaatagatgtttaaatcattgctcacactggatccataaatgtctaaaatgttgatgaagaaataggtgattagagagtaaaattaatagagacttacccttccttgcattttaacataatattctttccccttttccttcctctgttacttggctcttaaataccagaagtgagatatgaaaaagggaactgggaacaagtattgaaagcaccataggtttatcttatattagcattttccaaactttataatgaaccagcagtgacccacacatctgccaggtaggaattgctcatcagttgtgtcgcgttatcttgttaagcttcagcaatgttccatacagccactaataacagatcaaagtgagcattagggttgaaattagtaagctgtttcttctcagttctttctggtagttgaataaatatagaatgtattaaatagttttctttatttcagaacttctcagagtctgtaatatattgtatggtggtagcttaggaggaagatgcaataggaaacttttcccagataggttcactattttttttttccacgaaaaataagctgttctcaaaatacagtttacaaaattttatccttaactcttcactctttctcctagttagggagaccgctccaccagtagaaaagataaaccctggtaatttgttgtgtaaatgggataaatagcctagtacctagtcatgtggattcaggcagcactgagcctaaattaaagtttgcaaggtatacatgttaatgtatctaagttactatatttagcctgtttcttaagtatgtttcagaaacatattcgtttttttcagtggcagttaccttcagatgcatgtgcttctaaagcatgttggttgcatgtgcagtacatgttgcttaagcatttagcttcagaatggcatctttcctgtgaatgtcttaacatttacaaaaatataccaggatctcaaatatcagtgctggtatttttttttttttttacttaaagaaactgatatgattaatttttaagagacaatatgatcctgtgtgggctgtgtaaccctagtttttattgtcttgtagttattaaatagagcatctgttgagggactcttttaaaaccacagccatgaacagacgttggggctaagagacagagcagcctgcgacagtgtggacctacctgtagcagctagcaaaggcctctagcagctacagtcccttctggagtctttatttgcatgcaaaatgcaaaggagtcctggtgacctacctccaaggcagctgccctcctgaacactcccttggaaaacagtaaacatcattttggaatgtgaacaaccagagactacacaggagaaaggaaaaaaaaattctgaagatgcaaatctgggtggcttcaccgttcagttttttaataaaaggaacaatatacaacacgttgttctttttctcttttgaaatcccttctattacag

SEQ ID NO: 1011 - DNA, 2653 bp, Homo sapiens
tgacattgtgccactgcatttcagcctgggtgacagagtgagactctgtctcaaaaacaaaacaaacagaaacaagaactctatgttgagaaatccatactagagggtttaatttctcactttgtgtgctagtgattaataaatttcaagcttatcacacagccagaaatgtcacctgtgtttctacaataaaagatttgggaatattgtgacattttttcactgagccttctgggttcattattaagatataacaattttagaagacttattgagataggtatactttttaaaatttggattcaatatatcaagctcagcattttgtcttttttttgttttgttttaaacaactttgggtttacttgtaagagtatttcagtggaggaaaagtatcagaagtttagcactgagtgcctgcctaactattttatgtcttctttcatgatgatgcttaatctcaacataatgactcagtttaccattgtaaactctttgtaggatgtcactgattttatcagtcatttgttcatgcagctgggaactgtggggatatatgatttgccacatctgaggaacaaactgggtgagctccattgaaaaatttctaactttcttattaaaagcaagcttcctcacttcctgatggcttatgcaaattaatgcctatttattcatcagagggtgactggagagattatggttttcttatgaatttcttgcttgagcctgcttgtctgctgtttctaagttgtctgcactattttatgtgagtaattttctactttattatgttctgttttcacatgtcaaatcagctctcccaagaatgctacttgtaacctaagtagacgtgaaccgaaaagggtaaagacccagctaaaaaaaaggttgactcaagttcagttcacattcgtaaagtagttaggctgccttaggttgcttattcttttcttgaaaagaatccctcaagagagaaacatgtgaggccacagcagcttagatctgtcttccacagagaaggtggcttttacagagaaattgacatactcatcacttatctgacatgacccagctttgtaaaactggcttctattaaaatagtcttaatagactattcactgaggaagagagaatcttattcactctttacattctcttcacattttcagaatagatgtttaaatcattgctcacactggatccataaatgtctaaaatgttgatgaagaaataggtgattagagagtaaaattaatagagacttacccttccttgcattttaacataatattctttccccttttccttcctctgttacttggctcttaaataccagaagtgagatatgaaaaagggaactggggacaagtattgaaagcaccataggtttatcttatattagcattttccaaactttataatgaaccagcagtgacccacacatctgccaggtaggaattgctcatcagttgtgtcgcgttatcttgttaagcttcagcaatgttccatacagccactaataacagatcaaagtgagcattagggttgaaattagtaagctgtttcttctcagttctttctggtagttgaataaatatagaatgtattaaatagttttctttatttcagaacttctcagagtctgtaatatattgtatggtgatagcttaggaggaagatgcaataggaaacttttcccagataggttcactattttttttttccacgaaaaataagctgttctcaaaatacagtttacaaaattttatccttaactcttcactctttctcctagttagggagaccgctccaccagtagaaaagataaaccctggtaatttgttgtgtaaatgggataaatagcctagtacctagtcatgtggattcaggcagcactgagcctaaattaaagtttgcaaggtatacatgttaatgtatctaagttactatatttagcctgtttcttaagtatgtttcagagtcatattcgtttttttcagtggcagttaccttcagatgcatgtgcttctaaagcatgttggttgcatgtgcagtacatgttgcttaagcatttagcttcagaatggcatctttcctgtgaatgtcttaacatttacaaaaaagtaccaggatctcaaatatcagtgctggtatttttttttttttttttacttaaagaaattgatatgattaaatattaagagacaatatgatccttgttggcttgtaaccctagtttttattgtcttgtagttattaaatagagcatctgttgagggactcttttaaaaccacagccatgaacagacgttggggctaagagacagagcagcctgcgacagtgtggacctacctgtagcagctagcaaaggcctctagcagctacagtcccttctggagtctttatttgcatgcaaaatgcaaaggagtcctggtgacctacctccaaggcagctgccctcctgaacactcccttggaaaacagtaaacatcattttggaatgtgaacaaccagagactacacaggagaaaggaaaaaaaaattctgaagatgcaaaatcttgggtggcttcaccgttcagttttttaataaaaggaacaatatacaacacgttgttctttttctcttttgaaatcccttctattacag

SEQ ID NO: 1012 - DNA, 32205 bp, Homo sapiens
tatgtcagactgctatagtatacttctacagattatagacctccagtacctctggccagaaagatggtatcgtaaacaccctattttttttcttttcttttttcattaggtacaagctttgtgctaagaagttgacatactataagctacaaaagttctgtaaagtagatataactagtttcattttatagatagagaaaattaatctcttacagtgctaagctcacagagtttctaactgtaaaatgctagaacttgtctttcaagcctaaagacttccttggggctaaatagtgaaaaaagccatttcacaaataagtaaatggtatttagaggcatatttggatttcctggtaaattccagtctgtgagcatcatgaatattagtttaatgttgcatgggctcatgttgaagttttaagagaagaactgccttgaagcttaggtttccttagctattaggctactgactttcttgcctaaaccagggttttttcattgaagaccaaaacttaccttctccttcagtttgtagtttggaaattggtagaagagctttgtaaacttcaaattaagtacaaactaagtgtcatagtcaaatttactaatcttaattacagtattgttcaactgattgctatcttctagctctttcctgccgaataatggtcttgtttcctgctctgttggtttagagctgacttctttcagctttggtaagcctgaaattatggggttatgtttaattcatattgtctgggtggactttcctctcttgcatttctgcttgaatagaagaatttttctctagagagtagtttgtcatccttactctgttgattcagatgactctttgtatgatctgagaggtatactgttctgctattctgagaagaagtatttcagaaagatgaattaagagtacagtggactgctcccacctggaaacttttatctatctcacctctggacctgataaattctttatcactcaggaccttgatgacgctgctctctgaaaccctccccagctctctctattaccgtgagaaacatcagaactttggttcccattgcatatcgcaggtacctctgctttcatgccatgctgtaatggagtgattgggtagcatgttttcatctctttccagattgaaaatctgtatttctccctgtatatcttcaacacctaatgcacatagaactttgtaggtacctggaaaatgcaccacagttttcttttctttttgcagacttttcacaagtattaccaacttacaaagaattaattttgtaggattctagaaagacaaatcaggaatggtgccatatacatcttttttgattccctgctctaaagaatattatcaggttaccttcctgcagagttttaaaagaattgcatatttcaagctgactttcaggatgtaaatataaccaaagcaactgatatgtaaaaaatatattcaatggcattcctagattttcttctagggtgttttattgttttgggttttacatttaagtctttaatccatcttgagttaatttttgtataggtataagaaaggggtccagttttaattttctgcgtatggctagccagttctcccagcaccatttattaaatagggaatcctttccctattgtttgtttttgtacggtttgtcaaagattagatggttgtagatgtgtggtcttatttctgagatcttcattctcttccactggtctatgtgtctgtttttgtaccatgcttttttggttactgtagccttgtagtatagtatgaaagatagcatgatgcctccaggtttgttctttttgcttaggattgtcttggctatacgagcttttttttggttctatatgaattttaaaatagtttcttctaattgtgtgaagaatgttaatggtagtttaatgggaatagcattgaatctgtgaattgctttgggcagtatggccattttcatgatattgattcttcctatccatgagcatgtaacgtttttcccttcgtttgtgtcctctctcatttccttgagtagtggtttgtagttctccttgaagagatccttcacttcttctgtattcctagatattttattctctctgtagctattgggaatgggagttcattcatgattttgctctctgcttgccttttgttggtgtatagggatcctggtgacttctgcacattgattttgtatcctgagactttaccgaagttgcttatcagcttaagaagcttttgggctgagatgatggggttttctagatataggatcatgttatcttcaaacaaagacaatttgacttcctctcttcctatttgagtacgctttatttctttctcttgcctgattgccctggccagaactcccaatactatattgaataagaatggtgagagagggcatccttgtcttgtgccagttttcacggggaatgcttccagcttttgcccattcagtatgatattatctgtgggtttctcataaaaagctcttattatttgagatacgttccttcaatacctagtttattgagagtttttaacatgaagcgatgttgaattgtatcgaaggccttttctgtgtctattgagataatcatgtggtttttgtctttagttctgtttatgtgatgaatgacgtttattgatttgcatatgttgaaccggccttgcatcctggggatgaagccaacttgactgtggtagataagcttttggatgtgctgctggatttggtttatcagtatttcattgagattttttgcgtcgaagttcatcagggatattggactgaagttttctttttgttgtcgtatctctgccaggttttggtatcaggatgatgctggcctcataaaatgagttagggaggagtccctccttttcaattgtttggaatagtttcagaagaaagggtatcagctcctctttgtacctctggtagaattcaactgtaaatccatctggtcctggactttttttcattagtaggctatttattactgcctcactttcataacttgttattgatctattcagggatccaacttcttcctgattcagtcttgggagtgtgtatgcatccaggaatttatccatttcttctagattttctagtttctttgcatagaggtgtttgtagtatttgctgttggttgtttgtacttctgtgagatcagtggtggtatcctgtttatcattttttattgtgtctgtttgattcttctcttatttttgacaaagctgacaaaaagaagcaatagggaaaggactctctattcaattaatcctactgtatatctggctagccatatgcagaaaattgaaactgttcctgtttcttaatccatatacgaaaatcaacttacgatggattaaagacttaaatgtaaaacccaaaattataaaaccctggaatagaatataggcaatatcattctggacataggaatgggcaaagattttatgagaaagacaccaaaagcaattacaacaaaagcaaaaattggcaaatgagatctaattaaactaaagagctctgcacagcaaaagaaactactgtcagagtgaacaggcaaccaacagaatgggagaaaattttttcaatctatccatatgacaaaggtctaacatccagaatctacaaggaacttaacaaatttacaagaaaaaaggagccccattaaaaagttggcaaagaacatgaacagacacttcccagaagatattcatgtggccaataaacatgaagaaaagctcaacatcactgaccattagagacgtgcatatcaaaatcacaatgagataccatctcatgtcacaatggtgattattaaaaagtcaaacaacatgctagtgaggttgtagagaaataagaacgcttttacactgttggtgggaatgtcaactaattcaaccactgtggaagacagtgtggtgattcctcaaggatttagaaccagaaatatcattactgcatatagacccaaaggaatagaaatcattctattacaaagatacatgcacatgtatgtttattacagcactattcacaatagcaaagacatggaatcaacccaaatgctcatcagtgatagactggaaaaagagaatgtggaacataaacaccatggaatactatgcagcaataaaaaggaatgagatcctgtccttttcagggacatggatggagttggaagctgttatcctcagcaaactaatgcaggaacagaaaaccaaccaccacatgttctcacttataagtgggagctgaacaatagaacacatgggcacagggaggggaataacacacactggggccagtcagggggtggggggtcaagctgagggagagcattagaaaaaatagctaatgcattctgggcttaacccatttatgcctagtgttccatttctggaatgctaagcatgtggaagttctttatatcctgctcaaggtcattgccaaggtctgatttttcacattcaacaaattgcaacctctggcataaatgggttaatacctaggtgatgagttgataggtgcaggaaaccaccatggcacatgtttatctatgtaagaaacctgcacatcctacacatgtaccctggaacttaaaaaatttaaaatatatatgtatatatatttaatatggaattttaaaaattactaatgagttcttttatctgagtaattttgcatcaacatgcttttattatggaagagaagattcagtgagtacaaaattgcagatacatgtgtcagaagatccctgaatataataaggcttagtattctgtgtcataattgcctgtttgtattcctctctggtctttaaacttcattagggcaaggatcaactccatcttactaaccatttgattccctatgtattacacgatatatgaccaataataagccttcaataaatacttgtaaaataaagaatgttatgtaatatatcatgtggtattgttttattgatgtgttctttgaagtgttacctttgtgtccttagaggctatggtgggccctcaggccatatatgttggatgatttagtggaaaagagattagacttttatattttattctatttatttatttatgttttaatcttgtgtaagcctatagaggccaagatagggctcagagttaaaaacagtgatgttctaactttcaaaactactaaaaacaaaattagctatcaagggaaatcctgagtgttctgactgcaggggttccccaaagcctggaggaccgaagctttgaaatgctgcatggtgtgcctcacctctgttgagtatagtgaggaacatgagctgaggagtggattagatgaactcttaagatttttttccaactttacggtttgagtttatgagtaagtaagtgaggaatgagcccagggactttgactactttgctgtgcagtaaattgctgttttcttagctaattctggagtgtgtattttggttttaatgtaatgtcctttcagcactggaaataaacagatttatgaccctccattttcacatgtaaacttccagttccttcagtaaaatgctggaagttgcttggctgtaaccactgtaactatttcctggcagttttgcattttattacaattcgactttttaaatgcatggttcagtccagttaataggcagaaaactatagctattccttggaactgacatagggaagttggtttctttctgaggaaagatgtgacactctgatggatttggcaaaataccaattcagtaaaatttgcctggttcctttctgacagcaaatggaggtaattgtacgtatatagatttctacagtaaacaaagggcaaaaatggaaacattttttgttttttaatgttgctggaatataatatttccatatttggttaatcatcaaatcattcaactccatgcaaagtactcttttcaaaattacaaatcatcttgatggattagacttggatgtctaaattttttattatgtattctaaattatctataggtacattttgaaaattatatatacatgtatcactgtactacatttgttataaaatgtgaaatattaagcgattaaatactttattaatgtcataaaattgtgccctacccaaaatatattttaagaagatatcatttgaaaataatgtaaaatattcttcattattatgattttgttgccaaaagtaatgttagagtccctgttactgataattttcatgactgtaaattttcaacatttggaaacaaaattttctgatgtgttttaaaatcttaaagaatttcagtagattttgacacatttttgttaaaagtatgaaagtgtcacagctttagaaggatttagaataattatcaattggtattagggatgacaattttaatagacaaattttaactgaaacatttgctttattgatgtctaggactaaaaaaaatattatagtgatggaaccatttcaaaacatctgtttttaaaaacttctgtcaacatgtttgacagaagtcagaatagggtaattataaaaaaactgccattttcttatgtttgcatcattagtatttgcaaatccttgtttctttgcaagtatattttaaactacttgttcattttatgagtgttagcctgattaattcagataagatgctcaagtcagtttaagcaggcagatgtgaaaaagggaatatgctgtgccttaactatcttatagggacttactagcacactgtacataacagatgaacatctgatattagatctgatgggcacaccaatgttgtttcatatattaaataatagtggaagttttcaatttaattagtttatttatttatttatttatttttgagccggtgtttccctctttttgccaaggctggggtgcaatggcacatggttgcagctcactgcaatctccacctcccaggttcaaaggattcttctgcctcatcctcccaagtagctgggattacaggcgtgtgccactatgccaggctaatttttgtattattagtagagacaaggtttcaccatgttggtgaggctgctctcaaaatcccgacttcaggtgatccacccgcctcagcctcctaaagtgttgggattacaggcatgagccactgcgcctggccaattgtatttttatgttagaaatatatatgggagttacaatactttgtttccaatgttccgctggaaaccactggttgaaaggataggtcccagtgtcagctgcccagttggcagttttggatagaatataagttctatgaaggcatggatgaagtatccttcatggtaatgatggtaatgttagtatagtcacttgtttaatgttgtataactttttaactcttccaacttcaatttcatctatatctttcatagcagtccagtaaagtagtatcaattatagatatcattcctactttcagataaagtaactgaggctcactagttttgacttgctcaaggttacgtaaatgataagtgacagactggatttaaagggcggagtccactttactaaactgcctctgtcttctagccaagtttgttatgtaaagtaagtattcagacattggctaagtatattattaatcaagaaaacagtagaacaggtttaaggaatttttttttccctctcctcagtgtcaaaaagcagtcaagtaaaagatccaagataaataacttcagttcccaaaaataacttcaattccaaaatttccctatgactaggtatatctaattggatagctgataaaatgagtgggaaattgaagaagggatattttgagaatgtgtggcaacttaatggtaatattgaagaagcaaatggatagttattgaatcataatagttttttaaacttaaatactagggcttgatcttcatattttaggaaattatctatttgttgcagtagaaattagcataaatgaatggaaacttaaattatctcatctgtgcaaggcagtcttcagagactgatgtttatataagtgaaaactcagaaaaattttttggctgcatttcaagctggatagcggggtcaaaacttcaacttcttaattggtgatacaacgtcagaaatcacaaaagaagtatttcacaggaaaaaatgacataccccgaaaacattcaaatcaagaaaatcacaggggtacagtggatggtcccccttaaggtactgcgtacttggcttccccgctggtaaatgcctctcttttactaagttgttgtcgtgcagagtggcattgcagctctgtacttttacagaataatttcaggttctaaaattgatacattatttcagattgtaagaatagtataaaataaaattttaaaagggaaaataattccatcaatttaatggaatgtgtagggtttaagttataacaacaaaaacaaagttgtagttttttaggattactcatataaatagtgtgtctattaagaattactggctttatgaatattaaataagaaggctggccgtggtggatcatgcctgtaatcccagcactttgggaggccgaggcagacggatcacctgaggtcaggagttcaagaccagcctggccaacatggcgaaaccctgtctctactaaaaatacaaaaattagccgggcgtggtgacgcatgcctgtaatcccagctactcaggcggctgaggcaggagaattgcttgaacccggaagacggaggttgcagtgagctgagatcgcgccactgcactccagcctgggtgacagaacaagactccatcttgaaaaaaaaaaaaaattaagacaaccacagatataaggatttgcaattagaaagcttgaagggaaatttttggaacttctaggtcaacctaaaattacaaatagggaagcagctttggagaggaacatttgcacttctgaagtaatactgtgatttggactgtcagacattgtgatatattggcatcaccacacctctgttaattataaacttacctattctcagtgccttgttaactgttgaaataggacttgacatttgttgttcttcctcttctgttattcatttattcactcatttagtagttaattacttcctagtgccagatagttttctaggtactgaataaacaaaaatcctattgtcatagttatgtttttgtggaaagaacaacctgatagactatcgtgaaaaataaatgagttagtatacataaaacacagcccatgagatatagtctgtaattatcatccctgcttcatttatttatttatttatttatttatttagagaatggatctgattctgtcatccaggccggagttcagtggctggatcattgctcactgtaacctcaaaacacctggcctcaagtgattcccccaacctcggcgttccaaagtgctgggattaaaggcatgagccactgtacctggccattgctcctgttttaaagatgaggaaactgaaagtacagagaggaacgtgacttgctcaggatcacacagccaatcagtggcagagcagtctaggcagtctaggcctgaaggcattattctttctttctgttctgcgtcaaaaaccctaggcaggcatggtaaaaagactgaaagagccaaggcaacataggtacctgaagaatgggagaacacctatgaggactgctagaaattttaggcagccctttaaaggccttgggcaacaatttgaacgtgactcatgagtcagttaattctctgcacctttttttttttagagaatacaatggataaagcaatgacctttgtaacatgtaaacctgtatttgaatcctttcctctccatttaattttgcagagtcaccttttcttcattagaaagaaattttatcccaaagagattatcgtgaggctcaaataatataggtggaagccctttgggtttaaaaaaaagccttttctgtcatttctgggtatctcccgtcagtgattttagtaattgtttacctctctggctcttcgtgagaagacaaattgtaggaagaagtggaggatggcattgggtaggatgcttagttctagttccaccacttccttaggtcttttttttgtcccccaagactatatcatttctgtgttctcttgaacctgtaagatttatgagtaatctgtacaatatttataaagtatgaaatctctgccattgtggcacaaaagtagccatagacaatgtataaatgaatgggcatgctgttctccagtaaaactatatttatagaaataggcagtcttctccaattttagtttgctcacccctttcctatagaactcaggtttatcatatacaatgttacacattattcctttgaataaattgtttacctaatactttttaaatttgggcattttctaggacattctattgtttttatttttaacttgtgttatactgcagtgaatgtcttcctgtgtgtagcattttgtttgtgtatgtgtgtcaatatctataaagtagctcttaagaactctggaaacattgtcagactgcttcctcaaacagcagaggtgggagggagcatcggcctaaccctacctggcctgccttaccagcatgcaaccaaggagaagagaataggatcaagagccagtgccagagagaagtacataatacaactttatggagtttaggttgcatcctataaagttaccatgttacactgtttcgatctaccaaagtagaagttttacatagtttagtatgaagttaattttattaaccttttcacacaacacaccctctcatattgctgcccaacaatgtcctgggtctttgtttccatggtcatcatattgagtagggttttagcagggacttgagtagttgggaactgaactcatgctagtgaagccattcttcactagaagcagacatatgggatccagaatatcatgaacaaccagctgggtacagtggctcacacctgtaatcccagcactttgggaggctgaaggaagcagatcacctcaggtcaggagtttgagaccagcctggccaacatggtgaaaccctatctctactaaaaatacaaaaattagccaggcctggtagcacatgcctgtagtcgcagctacttgggaggctgaggcaggagaatcgcttgaacctgggaggcggaggttgcagtgagccgacatctcgccagtgtactccagcctgggcaacagagtgagactctgtctgaaaaaaagagaatatcatgaatatcaccaaagataaaagcaagatgcggatatgagtagcccagagtaacttttcctgtgctatataacacagtgagtggtgattcccacaattcaagtccagtttttctggattctaaagccatacatttttaactctccccctaaatatgatttgaattcagagagtcagatgcaataaggtaattttaactttaagtgtagtttagcccacacatttctctaaactgggggttggcaaactacaaacctctttttgtaagtaaagttttattggaacacagcctagctcattcatttatgtattccctttgcaccttttaggttgagtagttgtgactgaggtcttccagccttcaagcctaaaatatttactatctagtccttcaaaaagaagtttgccaacctctgcaaacaagtgaaataatgtgtattagagtagagcaggagtccacaaactacaacctctggagccaaaaccaccctactgtctgtttttgtaaacagaaattttatagaaacatagttgacccctgtgccaatttgtttgagtcttgcttttgatggcttttgtgctacaagggcagagttgaacagttgcaagagaactaagtggcctgcaaagcctagtggtctttgctgtctggccattataggaagtgtttaccaaaccctgcatttgatcatggaatcccagaatgtttatacctttgaggatttttttttctactttccatattttacaggcaacagaactaaagcctcgtaaaatcttgcccaaggttctacaaatagtcttttctattaaattaagtcagagcctgaaattgtctgtgcccaagtctctcctcagaaatttagcacagcattttccctttctgtctcccacatgctacacagtcatcctggatcatgtgccccgcctccatgaggagatgttctaacatgagggtgactaggctctggagccagagcatcttagttcaaatcctggatctgttaaaaataatagttatttttcagttctaacactgaaataagacaaaaggccatattactgaaataaagtgtaaagaatatatttaatactcaggttactttagccccctcatgatcagaatatgctaataaattgagagattgacagaaaaaaaggattctgtttcactgtggctcacacctgtaatcccatcactttgggaggccgaggtgggtggatcacttgtctggagttcaagaccagcctggccaacatggcaaaaccccgtctctactaaacaatacaaaaattagccaggcgtggtggtaagcacctttaatcccagctactcgggaggttgaggcaagagaatcgcttgaacctgggaggtgcaagttgcagtgagccaagatcacaccactgcactccagcctgggcaacacagcaagactccatccctggaaaaaaaaagttcatcatttgttcttgtagtttcctagtgtggcccttgtctcagtggaaaattgtagtgtgatagactgaggagaattctgtttctgccacttcgcctgttgccttggtaggagctccttatctctgagctgagctccttttgtccttggtaaaatgtggttattatcatctgcatcctcatagtcttcttgtaaggactgtgaagtcacttttgaaaaatgccttgaatatgccagatggtctgttttctttcttttttgttttgttttgttttgttttcccttggccttcattcctggaagtgttttgttatatacattttgtttggtggccaacagtgctaaccacagaaaagtttgtatgtcttctttttctagaataattcttacagtgtaacctctcagggtgaagtttttgttttgaaaggggcacatttactgtgaatgagagccatggaaatggacctgaaatttgaagacagattttacttggttttcttttctcttatttgtttgcagtataaagaagagggcagcaaggtgaccacttactgcaacgagacaatgactgggtgggtgcatgatgtgttgggccggaactgggcttgtttcaccggaaagaaggtgggaactgcctctgagaatgtgtatgtcaacatagcacaccttaagaattctcaggaaaagtgagttgctacaaatgagacatacgtttagttttgttttatagtatatatgaatatgtgtgtacatttttggaattttagtttgattatacaaaatatctttggcttagaaatattaggcatgctatgtaaaaccttactggaaaaataaattgaccaacattattgagagtattttttcaaagtgttccaaaagtaatggaccaatgattactttaaatgaaatcatgtaatggaccacagaattgcaaattactaataaagaaaagccattttgcttattgccatgtaataacatgttgcatgatacaagtagatacgtatgtttatgctgcaacaagtataggtgatactaattgggcaacttttaaacaagaccataaataactgaaatcaaagttcttagtatttatgcagcctgttggtttgcgagggctgccataacaaagtaccacagactgggtggcttaaggaaggttgttttttcacagttttggaggctagaagtccaagattgaggtgttgtcaggtttggtttcttccaaggccacactccttggcttgcagatgtctgcttgcttactgggctcctaaacagtcttttctgattgtcctaatgtcctcttcttataagggcatcagtcatattggattggggcccacccatatgacctaattttaccttaatgacctctttaaagctctgtctccaaatacagtcatatggctgtgatacagggggttagaatttcaacgtatgaattttgagggggacacaattcagactataaactgcagttaatgtttactgttaaattaaatctataactgactaaaccacacaaacaggagatttcaaattagactttattagttttggaaggaagagatgaaatgttgttactttttctgttttatgtagttgtaaaagccactaaaaatgtacatgtacaaatcatcccaagccaggcaacattagtaatgaatgactgcagcacagaggtaagagagatgatttaaaggaggatgaattgtctgcaaaggtgctgggcaagatctagactaattcatccccttcattttaagtttaggttttaaatagctttgtttggcttgatcctagagctacacatttacttttaacttgtttactttgtaccctatcatttaggatatgctatgtactattgtactctatttgatatttcaaacattctctcatttagtgaagaagctcccaaccggagtgctcagaacctacattgcctcacctgtgaagtgagcatgtgggactgaattgcctttgaggtctctttcagctcttaatgatctgttatcccatagtaagatacattatttttaatctcgttggatcttaaacaccaaaaataatagtatttaagacgtaggatgctatcttgtcattattttaatgcacatgtcaacacacgaggttttgctagatgttatgataaagcaagcgaaacagcaggctactgctcctcaaatatctacagtcaatgaaatattgactggcgttgtgggaaaatatctcaaaagtattttatttacaatttaaaatatattcttttgcctaaagaaacaatgaaacaactataacttgtttttgttattgtgttagtgtagtcatacatatgatacagttttataatctgcttgataagggtacgtctctgggtttttcacactttgcaacaagtgggaaagaacttcgacaaaaacattaaaacattatcaacctggttgcacgtttttctgattattttcagtgctcttaggtttttagaccatatcaaaattctctctctacacacatgatttataagggaaagaaaagtttgcagtatgcctaaaatgttcctcaggttaattatatcttgttttgcatagttgaatgtttatggaagtcttagatagtgagtcactctgaaaccacagactcttttttaatagtaataatatggtgagttctataattcctagcatctagcacacaggtatgataaatgttttaattaagtgaataatcagcttcctgaatttttctactttgtaaatatgctctttgtgtgttgaatctatttacatatatatccaagcatttggcacaaggtaaaccaatgtggctcagattttaatgttattgtgaatcacttggggatcttgtttaaaaaaaaaaaaaaaaaggagattctgattcaggtgatctgggctgagtacttacagtatgcatttctaataaacttctgggtgttgctactgatattggttcaagaactaaattctgagtaacaagtataaaccgaatgtccataaagtataatttcttttagtatcatatggttataatgcttgcattttgtatatatgttgcatacaggttttgcttttctcttttttcttattaaaaaggttataaaggtacactgtagaaactgtagggagtaggggaaagcttggcatctcatgccaccattcagaggtaaccatgtttggcattttaaaaatgcatttatagtgtgtgtgtgtgtgtgtgtgtgtgtgtgtgtgtgcgcgcatacatatatatgtatgtattatacatatacgttaatatacatataatatacatatattactgtgcaaaagttgataaattgattatgattatgtataaactttgatatcttctcatatttaatataatatagttgtgagcactcttccatatcattaaataactttctagacattttaaatgaatatatagaaaatgaaacatcattaatcagtcccttatcttagaatatttatttcggttatttacaatctattagtagtttaaaagtacttcatggaaaatccttatacatgcatcttagttaacttgaacttttatttttagagaagacatgccaggctgttctaggctattgatacatattgccaattaccttcctgaaagattgtaccactttccacttaggcacagagtgtgaatgcctgttttaattactctatttacatcagtaaagactatatctgaaattatctcatttttggggacaggtattctaataggctctacaagtatgatcacaactttgtgaaagctatcaatgccattcagaagtcttggactgcaactacatacatggaatatgagactcttaccctgggagatatgattaggagaagtggtggccacagtcgaaaaatcccaaggtaatcaagcacacattttatcattaataaaaatatgaatgctgaataccatcctccctcctaagcagtcctaccagtgttgctcgccattttattggtcatcccagttgtaactttttatgtgatctgttaacgatctttatctcctattgatacatattctgtcactctccaagtcctatttatgagtttttctttcacatgtctgttgtttccattgccccctttccattttctacactctggcatgcagctttgtcctgtttcccccatgctatggattagcctcctgccggtaaccacctgaggggttcttcctgcctgctgcataaagaaaaaccatggcaatatagtagagaaagagcttaagagacactaggctggccatgccacgtgggggatggagttcatattcaaattatcttgtccaaagctcataggtaggggtttttcaaaggcagcttgggggaaggggtgggggtggccaggtaacagatgcttgctgctgattggttggggtgggtgaaatcacagggagttgaagctgtcctcctgtgggctgaattgcttctaggtggggccataggagtggggttgctgggtccaggtagaaccacgggtgtcagacatgcaaaaataaaataaaataaaataagataaggtaagataaaataaaataaaataaaataataaataaaataaatataaaatttccctgaaaagatatttcaaaaagccagtcttagattctacaataatgatgttatttgctggagtaattgatggagttgcatgtcttataacctctggaataacggctgacaatctctcaagtctgcgccttagctggactcaggttcctcttctccccacagcctgactgcctccattagcttcacaaaagtggttgggtttcagggcaaggcccattgtcatttaaactgtagccgaaatgacttccaaagttagcttggcccaatagcccaggaatatttaagtggaaggcaagatgggggatgggttagcttagctctctttcactctcatagttttctcactggtataatttttgcaaaggcggtttcatgcctgccatctctttcgtcgctacctctcccagttcccattcttagctgttttatgaaatgcttctagtttcatcctcttataccaagttctgggagactgatttgagtaataataaaactccagtttcccatacagccggctctgcgtgaattaaactcattttctattgcaatttccctgtcttgataatcagttctgtgtaggccgtgaggaaggagaacccgttgggtgattacgagactgtgttactgcccactacctaatggatacatttagcctggtatccaaacccatctaattatgaccataactatatttatcaccttgctctgctttcaaacgatatgacacacaatgaatgaaaactttcatttttcatcttcatttgtgctgttccctttgcctcaaatagccctcaacttgcctacagtaactgtaaaatttgccacctaaaaaaaaatctcaaaatcctctctatgctttgatgtccagcaaaaaaaaaaaaaaaaaaaaaaaagttatcagtatagctctattactctcaaccagaggtggcatttttcatctttacccataagccccatggtatatttcttagtttgggaaattatatcataatactttgaatctgtctagtcagaaatttagataatttaaaaaaaaattatttttctgaaagtatagctggatctagcttaggatctacatctatctaatatagttccttaacatttgttaaatggccacggataagtcctgtaatgccatactttgctttaggatcatgtgactaaggggtaaggaattggaaagcaatggggagctagcagaatttgaaaaattatataggtaggttatttttccttaatacattgaaatagcctcaaattctcagagaatacaatgtttaatcctctaatatctgtagagttcatggctcaaatttgtattatttgaataaactactaatagattaataattactcaactaaaacactttgaaatgtgagagttcccttatctccctcgcaggcatatgacagaggtgtggcttctcacacctttggttgcccttgccctaccacccaaacccctagggggagcatgcagaggggcaggtgcagaggccatggggggtgcttttgggctctggccccacagcagtgtctaggagtggatgttggagactcctgaagcccaagtgggcatgtgttacagtgtgctctttcagcttagccgtctgcagatggcttgtgttaatcaggtcattagaccccatgccttattgcaagggcaggggtccaatgtgacagcctaagttcttgctcagtgtaccagaagaattggatcacacgtgggctggaaggatgagcacaaggttttattgagtggtggaggtggctctccgcgagacgactctcagccagagaaggaggatggaggggaaaggtgttcttcccctggagtccacttgttcctgttctcctctgggttcaaatacctcttccctccttttctgctgtgctgtcccaccactctccacagctctgtgccgctctgttcctctgctcctctggatgttcagctccttgtatctgtgcctgctaagattttgggtttatatgggggaaggatggggggcatggcgggccaaaaggcaccttttttggtgtgaaaacagaaatgcctgtcttctcttagggccttaggtcttcaggcttgagggtggggcctttgctgagggaccaccctcttctacccagtatttccctgtctcctgtccatatcaacattactaactttttcatctgcagactaataatgctaaggtgtggcatttttcaactgtgagactatgtgaaggtttttcctgtccaactgatggcatcctcccataattctacccctttcttaaaagaatcttttgcagtatttctccaagtttattctagagaatttcttgtctgtgaaatgctctagttaatcaaaattggaaaacggagcatatcatatccccttctcaaattcaccaaagtgaagtcctaatgtgtcttaatgtatctgcatgagacaggaagctgagatctattcaacaacaaaaatccaaacaagcatcaagaggaggagtgttagcacttgagcctagggagactgtggctcctgcctgaaagatgggagcctcagtcacagctgctttaccaagtgtcatatgctatgtttctgaggactcctgctaaagctcccttctccctccagccaaccacttttgttttagacaagggctgggtttatgaaggactgttttcatgactaaagctttatagaaggtttaagataaggagatggaattgagtgaagtaggaaatatgaaagcagatattataatctggcttcctgatttttcactagcatttttgtttataaattagttctgttctaagaatccaatgacgtaatagaaactctcaaagattcttaacttgagatatagggagtctttgaaactgctgaaattacagacagcatttattgtttatgagcatttctgaatctagagctttcactagatttgtaaagaatgtgggccaaaagattaagagccaatcctgtatcttgtactcaaaatgtttgtaattctcacctttttatcccccagactcctcttgctctctcttcattttcacagtgttactggaaaggggtcctgatccagaccccaagagagggctcttggatcttgtgcaagaaagaatttagggcgagtcctcaatgcaaagtgaaagcaagtttattaagaaagtaaaggaataaaagaatggctactccatagacagagcagccctgagggcagctggttgtccatttttatggttatttcttgattgtatgctaaacaagggatggattattcatgcctcccctttttagaccatagagggtaacttcctgacattgtcatggcattcttttttttttttgacagagtctcactgtgttgtccaggctggagtgcggtaaagcaatcttggctcactgcaacctctgcctcctgggtttaaatgattctcctgcctcagcctcccaagtagctgggattacaggcatgacccaccatgcccagccaatttttgtatttttagttgaaacagggttttgccatgttggccaggctggtcttgaactcctgacttcaggtgatctgcctaccttggcctcccaaagtgctgcaattacagatgtgagccaccaaacctggcctgtcatggcattcttaaactgtcatggtgctggtgggagtgtagcagtgaggaagaccagaggtcactctcatcgccatcttggttttggtgggttttagctggcttctttactgcagcctgtctgttctatcagcaaggtctttatgacctgaatcttgtgctgacctcctatctcattctatgacttagaatgccttaactgtctgggaatgcagcccagtaggtctcagcctcatcttacccagctcctattcaagatggagttgctctgggtcaaacacctttgacaacatcattaagcctcagttctcacactgtttttgttttgtttgtgtgtgcaatgatgggcaaatctctgccttataggatggtagaaaaaaggaacttaatattgtaatgactgttttgtgccagataattgctttaaactgtatcagcatcttatttagtcctgttaatgatatgaatgttatcttcataacagctgccattttattaaggacttatcagagaaaaacactgttctaagcacttgttacccattattacattgaattttcataacaaccctttgaggtaagcatgattatacccactttaatagaagtgaactgtagttttgtaatgttaggttccttgccaaatgttacacagatagtaagtgataaaatcatatgccctgaaattacattatgctgccaaacttaaatttcttttttatcctttatattagtatattcttaggtttaaacaagacaactagttaacacatactagattttgtccacagttcctggctcataactcccatagcccttgtcactatcttttaacgttggggcacattaggcctcagaagtaggcctcagaaaacagagtctctctctctctctctctctgatcttcttccgccctcctctcacctgcccagggcagcactctaatcttctcctgcctttctgatcttgggtcataagaccttcatttccaaagatgtcctgtgtcataccctaaaggaaggaacactgaacagagagaggctcagaagaatctggacaggccttgctgtgtttacatcattccctttatgtccagtcacatctctacatggttgtcagttgtgcctatttgatgaagtccccatataaggctcacaaggacagggtgcagagagcttccagatagctgaacaagtggaagttcctggagggtggcgtgttcagggagggcatggaagctgtgtgccccttcccccataccttgccctactcatttcttcatctgtttcatttgtagtatcttttataataaaccactaaacattagttagtatttctctgagttctgtgagtcactctagcaaattaattgaacccaaggagggtgtcataggatccccacattatagctggttggccagaagcacaggtaaacaacctagggctttcaattggcatgagaagtagggggcagttttgtgggacggagccctcagcctgtgagatctgatgccatctctaagtacacagtgtcaaaactggattggaggacacccagctagtattcactgtgaaattggttgcttgcttgatttgtggggaaaaacccacatgcatttgatcacagaagtcttttgtgttgacagttgatagtgttcagtgagagaattaaaaaaaaattgagtttcttcttcaacatactctctcaatgtgaaaccacagaaactatttccattcaaagatggaaatggtttgtttgcatcttagtttttatttatacatcttagaagaaatgtccaagctttgttttttctctcaccctatatataaaattacctatgaggcacagatttttatgatccttgattatatagactttgtccaaattgtgtgttttatagcattactgtaacttgttatagtaatctttgtgtatattatgtctcttaacattgtcttccatattgttaatgaccatctcatatttatctctgtatcatgtatatcttcaaccaatgtgactggcttaggagaaaaaattagtgaacaattaactagtgtttgtgtaatctatacaattgtcaaggttacaattgctatttttgaagaaatcgttgttgtttttctctttgtttcatctcagttccattttgtcatgtattcttttttttttttttttttttttttttgaggcggagtcttgctctgtcacccgggctggagtgcagtggtgcaatctcggctcactgcaagctccacctcctgggttcatgccattctcctgcctcagcctcccgagtagctgggactacaggcacccgccaccacgcccagctaatttttttttgtatttttagtagggacggggtttcactgtgttagccaggatggtctcaatctcctgacctcgtgatccgcccgcctcggcctcccaatgctgggattacaggcgtgagccaccgcgcctggccccttgtcatgtattcttaacctgtgttatatctaagagaagctgtgagagacgggaccatttgtggataggtgcagagggcatgaagtagcccagaaagaatctttgccattgactaaattttagcctagtaaaaaacatctggtaaccactgaaaaactagaacagtgtgatatgacaatgcccagttgaataagaaattcaaatagtttatagtaacaaaaaataatttttaccacattgtgactagtgccctaaaaacaaatttgaaggagcagagagagagaggaagtgagttttcgctgggggctggtgagtggaggctactttatgagcagttttgaaaattacaagttagggaaaaactcttaggggagttttaagtggtgagcaacaggcacttgaggttacaggagcagcagcataaagatatagaacagagaggccatttggcagtcttggggaaactccaagaagtcgaatgtgtctaaagctgtggttctctctctgtgtgtgtgtgtgtgtgtgtgtgtgcgcgcgtgtgtttgtgtgtgtgtgcatgtgtatgtatgtgtgaaatcgctaatacagagaagctgttagaacaattttctcacttcccaaaaatgtccgttcattcatgggcctaggcaactctcctttgtgtgtcttacagcccaacactgtcatataaggtgtggttctataatgaaacagttttatctgttgtttacggagctagtcagcctgtgttatgcttgttactggttgagggtgtccaggttcttggcttcttgaacaaagaattggacaaaactcacaaatgaggcaaggaaagaatgaagcaacaaaagcggagatttattgaaaatgaaagcacactccacaggatgggagtgggcctaagtaaatgattcaaggccctggttacagaattttctggggtttcaataccgtctagaggtttcccattggttacctggtgtatgccttatgtaaatgaagagggtggagttaagttacaaagtcatttactcagtataggccttgtgttaatggagagggtgttactcctgggggttgtggcccatgtaaacggagaggatgaagtgaagtgacaaagcccttcgcattcctgccattgctgaagtgtttccactttatttagttctaggaagtcagtgtgaattggccttatgttccctgcctccagaacctgttctcctgcctcacatagacccttttttccctttgccaacttcacttcttttacagccacctcactaccaatgtgtctgtctcctaagtcaaacatcagtgattcctctgttttctctaaacccttcttatgtcttctacttctcatctctttcttggtcaaaaatctttcaaaaatgagtaagaatgcagctattcaggcaaactaaaaataacatcacagtgatatacaaaaccagtgtcatttcacaaaggaaaattatcaatactagatcctgaaaaagaaacagcgaatgaaagccatttacacaactccattgtgtaattgacacattgaatcactcataaaacaggtgctctgggtctgaatctagatcctagctagtctggtagctgaaatcatagaattatagtagagtttaggaaatcatcctcaaaggaaagattatatgttgatatcaaatgtatatttcctttctaggcccaaacctgcaccactgactgctgaaatacagcaaaagattttgcatttgccaacatcttgggactggagaaatgttcatggtatcaattttgtcagtcctgttcgaaaccaaggtaaaaaaataagcctaagttttttgttaatttgtttggaactatttattgaacagttgctctgtgtgatggatttcggggatacctagatggaatgggcatgatcccctttttacagaaatagaaaataggtggcctatgaattattctttccttttatatccatgacaaactttagtaaaaaattttcttttctactgagcttagcatttattcagtactcttctcaatatattttccaggtagctagtgacaatcagagtgatatgtaagacaaactcatttgtcctcctagtaggaaagattctagtagaagcaaagaattgtgtaccattctgcaagtggtttgttggaatctttctttgatacctgttcctgtattcccccacccccattaatttagtcattaattactacatgaacccgtaaaataaatccttaaattattttcctggtagattttttgagctgtgtaaggacctttcaattcactttacattagaatacgatatgtgatggtaagtattaacccagcttcctgagtgatggcgtgagggcggaacccaggttcatgaaaagtattcctattattgaattttaccagttattttcagaagtttgatacaatgtgagttgatttcataacatgtcctctaactgcacttgatagcaaattatcttgttatcctgagttgtagccaacaatgacttggagaatctatgcaatactcagttttattacttctaagctcattttgaagataatactacccatggctgatttgttactataaaataggtttagtatttgctgtctggaaacattctgattagtgtctcctgggaggattataaatttatagtacccaaagataaactgttgtttccctttcctaaacttttagtgataatcagtctctgccgtgtctcattttcatcacttgccctccaagctcccatctcactgaattcttgcagtgttctgaatgttgagagccccaagtgggtcttataacagccagtcagcaacatttctgtttttcatctgacaccaagggtctcgtctctttgcttttctaccagttattctgggctcttcagctctaaagaaagtataggtcctgaaatctttccctaccttctcaatttcctggggagggcttctttggaaagtgggattggaaataagataaatttgaagataattgagaaatgaatggaaagtgaaattgaagggtccatgttaagagattgcaagttatgctatcaccaaatagattttttgtgcctgagaggattaattcatagtgcatattatgtgttgactttatcattgaggtcctggcacatgatagcattggcatgatataatttgagctactgatactatagtgttgcttctggtgttgttaccagaacatctaaaatatattaggatttttttaatggcagaggaaatgaagactaatatgacatagtccttgtcctagtgatttacagtttagcaagacatacaagcaaaacattaaagtaaagcatgataactactttaataaagcattttttaaattcattggtaacataagagaaggtagaagagtttagcaaacccttcccaaaagaaatgattgacaagttatatgagataataattcagggaaaggaaattcgactttctaaagccaaattatttgacattggttttcatatagcttggtaaaagctgttattttctcccatgttctttattctttgactgttataagtatgatttgtacagagaaatggcaatttcaaaacagagggctttgatggattaattgctttgaattgatccctcatctacagtatcttgtcaggtacttgagaaaataatgtacttaaagtttcctcttttgactttcttttggtattctatactgtaagttggggaaaaaagtattttctcttcctgctaattgggctacttgaaaattcccaccaactttgccaataccagtgttctgtataacccagaattcagaattagctgcaattaagggaattcacagcttttctgtagtcagagagcaaattgaaattaaagaaaaaagaaatagtgggaggacaaatgaggttttacctttacacttgaaaacagatttaagaacaagccttatacctagatttattaatactttgaggtatgagagggaagagaagcttagaaatacggcagaatgggctttctttgttcttctcccagctatgctgtttttatttattattgtatttttaagagagaagggaagtgtctctcctgggtcacattaattaggaaatacagagtgttttcataatgcgtaaagtctagtccatttaagtcttgtttcaaaatgctatttatattatttgagcaggaaggcagagaccttaaactgctccacccaattcattttacacaaaagattaaaaagaaaaaaacagtgtcaaaaggtcaagtgcccagtgttgcacaactaatgataggcaaaacaagagaggaggggaaaaaaaagaatcctgactcccgactcctagttcagtgtgttcttcactgttagaaggtgctgctgaacatagttataccatatgaagatcacactatctatttgagattgtagaaatttgattactgcagagctctggctgggctagattcacttcttattctttattgcattgcagtattcttaagagataaatggctcttttagaatcagattggccttggctgttgaaatgaggcattaattaccttggtagctgacacattcttacaggtcaggggcttgatgaagtttatcttcttcccttgttcctgtgattgctctgtaaatagaacacattcagagcccttgaatgcacttgcagcctgtgcctcccacagtgatcgatggtcagataatgggagtttaatgaccagtactgagagagattatttccatggctgctatgggccaagaaagctgggtggtcagaaagggaccttttccagactctcctgggttgtgttatttctttgacattggtttcctttcatgaggcgccaaggtgtatttgtaagttgtccagtgttgcacagctaatgaggggcaaaacaagaaaggaggaaaaaaaaagtatcctcactcctagttcagtgtgttcttcactgttggaaggtactgctgaacacagttatatgttcagtgtacaatgtacaatgttctttgacattccgtcatttgaaggatgggtcctatggatagtatcatctgcatggttttgaaaacaaaagatataagctaattttgccctgtctagtgactacgagacagggagagaaaatctgaatatttgttaaagtagacacagacccataaattgaaaaggacactaatcctgccttaggagacagtaaggcacttgtccctgctatctattagctgtgtgtccttggacagctcattgcttctttctgagccaccgttacacgttatctatcaagtgagcaggttgtacactagatgaattcacaggtccttcttccaagtgcttttctaatcttcataatttagataatctctcagtagcaaaacagtgtacaatatggtcaatctgagatttttagggggagaattttagggaacatcagaaatggcagtagttaaaaggaaataggactcacaggctgacttctctctataacttcacatggtagaagggatgagagttctctctggagccttttgtattaggtcactaatcccaaaggccccacctcctaagaccatcacttttgggattggggttttaacatgattttagagggacataaaccttcatctcattgcattagagatatttgaaagctcagctcacgtgtattcctccacagctcacatgtattcctccatcacccaacctgatggctttgaacgttgtagacataaatcctttcatcattatcaagaatattgccaaaagcttctcagaaattatgaggggtttttttagtttctaaaatattctcaaagaaagtcccatgtactaatgtttgccttttgatgaaaaaggatgaaatcttaatgattgccttaataagctcaacaatgcttgttagttgagtcttcttattgtgctgattcttataaacaacaacattcagtataaacattaatgtatgtgattcactaaggtttttgcatgattctctgtgaggcttcagatgtctcttggattatgtgtctttttttcatcgccagcatcctgtggcagctgctactcatttgcttctatgggtatgctagaagcgagaatccgtatactaaccaacaattctcagaccccaatcctaagccctcaggaggttgtgtcttgtagccagtatgctcaaggtaagtgttgcatttcagacaccatttatgagctatttacctgtgtgcagctggctgttgttggcaaaggcaaaaggatgatgcagtagagagagcgcagtgtctatagtcagaaaatctgagtgcaagtctggccctatcacttattaatggatgattgctcatggaatttactgtaccatccagcaaaatgtcaatagttactatatattgagtgagctctgcttgttacatatattgcctaacaatgctcaaaactctgagaagtagtaagtataatccctatttatgggcggggaacaggaactaagaaatttttctaataatttgaaggtctcacagcttttagcattggagtttcacttctaatcatcgtctccaaaacccaacttttattaaaactatactaacactggtttctctctgggagaattttaaaattctgtacttagggctgggcacagtggcttatgcctataaccctatcactttgggaggctgagatgggtgaatctcttgagtcctagagtttgagaccagcctgggcaacacggcgaaaccccttctctattaaaaatacaaaaaattagctgggcgtggtggtgtgtgcttgtagtcccagctattcaggaggcggaggtgtaagaatcacctgagcccaggaggtcaaggctgcagtgagccgatatcatgccactgcactccagcctgggcaaacggagtgaggccctgttatgaaaaaaaaaaaatctgtacttaggctttcagatcaggctgtatgtgatgtatgtcgaaaacacagctataattgattgagggagaaacgttaccattttaaagtttatgctttcaagcccagatttggccactaggaatttcccagctcactagtgaaactgctgatgagtgattatttgccagtgagcctttcattctttctaaaatatgtactactagttgtgacttgtaggctataggggctataatatatcaagacaatctttatcctcatgaagcttacagttaagtaagagatagagattaaataattataacaacagagtgaagaacagtgaagaaaaagtacagagttataatatatataatagggccaggactgcatgaggaaggtaggaaagacatttcggcaagaggttgtcagggaaaagacttgcttgagaaagagccaagttgtggggtctggctgcttagcaatgaccataatacctaacttttgctatttttacatgaagtaactaatttaaccctatgaggaaagtactactaccatctagattttacaggtaagtaagcagagatacagagaagttaaactcttcacacggctttggctttaaacctatataggcttcagagcctccccacttaaccactttgccatagctacatccatattaggtgctaagtagatatctgttaagtagaaggaggatgaaaggatagttagctagttggaaaatggatggatgaatgaagtgatgcttaagctaagaacaactttcaggggtaacatgcaaagaataatggagcaaagaagaaaaaatagaaaatgggataatcctttttctactaaggggtaaccatgtgtgttattcatcttcaggctgtgaaggcggcttcccataccttattgcaggaaagtacgcccaagattttgggctggtggaagaagcttgcttcccctacacaggcactgattctccatgcaaaatgaaggaagactgctttcgttattactcctctgagtaccactatgtaggaggtttctatggaggctgcaatgaagccctgatgaagcttgagttggtccatcatgggcccatggcagttgcttttgaagtatatgatgacttcctccactacaaaaaggggatctaccaccacactggtctaagagaccctttcaacccctttgagctgactaatcatgctgttctgcttgtgggctatggcactgactcagcctctgggatggattactggattgttaaaaacagctggggcaccggctggggtgagaatggctacttccggatccgcagaggaactgatgagtgtgcaattgagagcatagcagtggcagccacaccaattcctaaattgtagggtatgccttccagtatttcataatgatctgcatcagttgtaaaggggaattggtatattcacagactgtagactttcagcagcaatctcagaagcttacaaatagatttccatgaagatatttgtcttcagaattaaaactgcccttaattttaatatacctttcaatcggccactggccatttttttctaagtattcaattaagtgggaattttctggaagatggtcagctatgaagtaatagagtttgcttaatcatttgtaattcaaacatgctatattttttaaaatcaatgtgaaaacatagacttatttttaaattgtaccaatcacaagaaaataatggcaataattatcaaaacttttaaaatagatgctcatatttttaaaataaagttttaaaaataactgcat

SEQ ID NO: 1013 - DNA, 379 bp, Homo sapiens
atactagctgcatgcttggaaatttcaccttaacattctgagtttcagagttttgtgcaaaacccacgtattttctgcattaaaattcactataatgatgtttttaccctccttgaactgcagtagggctccaggagtatgcaccatttaaagtttggcttcctggacctcctggcatgctgccacatacctttgatcttttcaccacatggtggcacagaaacagcactggaaggcatagccagggtcggaatcattggaaggcctccaaggagatgagatacattttctttttattgttactgattgaatgtaatttccatcctattttgtgcccagcctcactgctatgtgaacatataaacagacctttgaaatc

SEQ ID NO: 1014 - DNA, 1143 bp, Homo sapiens
agacattgtattcatttctttattgtgtttacatagcacatactctccaaagagttcagggtacttttcaaaagacattgaataatgaacacataaaaatataccaacagtaaaaagtaggaagtagaggagaaacaatcaaaggaaggtgagatcaagcagtggcaaaaggattagctagtccagaggaaatgtcttggatattcattctgtttctcctccacagagttacttcagaacacttttccaaattaattttaactccttcgaaagggggctcatagtacatagcccaagtgagactgcagggaatgaggggaggccaaatccaggcttcatcattagaatgagtacttaaagataccccctgcccccttaccttccacctcaccccagctctagcttgccatatgattaattttcatgttagacatttggattatgatagtcaaggccgcagttgtctaaatgtaaatagtaccgagggaagagtagcacattccgacattctctcagtgagacttattcatcagatgggggctgtgagtgggtgagatttcacacagatggatgggagtctgctggaaggaaaaattcagagcattgaaggttctgcctgtgtgagtgtttgttgggtgaatgaggggactgagtaggaaggagggcaggcaatgaggctttaaagggaagaaggtaggaaatttgaactcatctttcctagtgcttactctcagcccattccctggtttgtggacctgaccccacactgctttttccagcaccactgtctgtgtgagtccattcacttcaataccagagccacctctttgtttcctatttactaagaagccataccagcatgagatctccttgatagtgttaaatcccactgtggaaagattgaaaaatatctcccagccttaccagaggttacgatctagtgtggaggcaaaagacattgagaagaaaaaagcaggtgcctcctcctggctctcctgttaggttaacataatcataattcccctttgaaatgtctcccacatttgccctttaacttcctattgccatgataagcatttaggttattacctaaataacttgttacctcatgccttgattatctaaataaattcttagatggcc

SEQ ID NO: 1015 - DNA, 2180 bp, Homo sapiens
gaagaattagaagatcagatgccaagattggtggcagaagaatctaacagaggtagcacaaccataaacaaagaagaagtcaacaagggaccttttgtagctgttgtgggtgttgccaaaggtgttagagattcaggagctcccattcagctgatcccttttaacagagaggagcttgctgagagacgaaaagcagttgaatcctggaacccagtgccttattctgtggcctctgctgcaatccctgctgcagccattggggagaaagcaagaggctatgaggagagcgaaggtcataatacaccaaagttgaagaaccagagagagctggaagaattgaagagaaccacagaaaaattggaacgtgttttggctgaaaggaatttgttccagcaaaaggttagggtaatacctcaccactaggaataagagaccatagtaaccaagggagcgggacattggtgccctgattatttaatgttctgaggcctttaaataaaatatgcccctgaactattctgtggtgtgtttcagatagagtaactgtagtaggcttcctgcccattttagggtattgaaaaggcccataagtagaggaatatgtatagtggaatcacaggatgaccatatgaggaacggtttttggcgtgctcttttgtggggtcattgaatttctgtttcttggactgcaggtggaggagctggaacaggagaggaatcactggcagtctgaattcaagaaagtccaacatgaattggtgatctacagtacccaggaggcggaaggcttgtactggagcaagaaacacatgggttatcgccaagctgaattccagattctgaaagctgagctggaaagaaccaaagaggaaaagcaagagttaaaagagaaactgaaggaaacagagacacacctggaaatgctgcagaaggctcaggtctcctaccggaccccagagggagatgacctagaaaggttaattactagggtttagttatcagcttgtgagtgctaatgggaagcatcccttaggacccccacttactggccgtagacaaaggaggaagccttaattcacaggccaccaagaattgagtaattacttcttagaaagctgcagccagtctccctgtgcttggtggcgttgtgctttcttctttctagctaatgaaaacataactgttgagaaatgtggttccattttgaaggggcttcattttattctgttggttaatgacttcatgtcatctcttctcctgccccctcactccttcatacagggctttggcaaagcttacgcggctacgtatccacgtcagctatctccttacttctgtcctccctcacttggagcttcgtgagatcgggtatgactcagaacaagtggatgggatcctgtacacggtgctggaggcaaatcacatactggattgagcaccagactgtatacccttctcttctcttatcttctgtctgttctcttttctctccctccctcacgtctctctctctctctctctctctctctctctctctctctcaccctcacctttatgccttatatagagaatctctgtgtaaatcctggctcataatcagtctcctttttatcagttttggtgtggagaaagaggccagtttaaataggctttcaagagtctagggtcagaaaagcaatagtcactaagctaggtgacctgaaagctttaattttcatgacctggatatgtggtctattgtatatctttttctgaaatggtttgtattcatttaggttagatcaatcagcagatattgggtccggtataccaggtattattttggggtaagctaacaagtacaactcatgtttgcagccttcgaagatgtaacaatctcgttggaaacataagacatacatcacattatacacaaaagtgtatgatatgtacaactgagtggtacagatatgacatggaagatctgggggaggaagttcaaggaaggcaccacaccagaaatgggacctaaattaaggcttaaagaatgagcatggccacactgtcagtgagtgttctttaggtggtaggactatggttgatatttttcttcttcctatcttcctgcctttttcagattttcaatattaaacttgttattcttacattggaaaaaaataaattgtttttaaaaagatcaa

SEQ ID NO: 1016 - DNA, 219 bp, Homo sapiens
tttttttttttgaaacagagtcttgccctgttacccaggttggagtgcagtggcgcgatctcagctcactgcaacctccgcctcccgggctcaagcaattctcctgcctcagcctcctgagtagctgggattacaggcacgtgccaccacgcccggctaatttttgtatttttagtagagatggggtttcaccatgttggtcaggctggtctcgaactc

SEQ ID NO: 1017 - DNA, 147 bp, Homo sapiens
tttttatttttattttttgagatggagtctcactctgtcacccaggctggagtgcagtggcacgatctcagctcactgcaacctccgcctcccgggttcaagcgattctcctgcctcagcctcctgagtagctgggcttacaggcgt

SEQ ID NO: 1018 - DNA, 27118 bp, Homo sapiens
cggcggccgaggcgatgagggtgttggtgcggcgctgttggggtcctccgctggctcatggcgccaggcgtgggaggccgagtccccagtggcgagcactggcccgactcggctgggaggactgccgggactccagagtccgcgagaagcctccctggcgggtgctcttcttcggcacggaccagttcgcccgcgaggcgctgcgggcgctgcacgccgccaggtacccgggccagggatccggggacccggccgctgaaggcctccaggccgcgcccgggcggccggccccgagggttttggacttctggttgcggaaagcatgggcggcagagcggtgtgggcccagatctcggcgtcttctggctcccagaaggtgcgccattcccgccggtcagcctttgggcgcctagtacctgcggtctgcgcccctcactccccgccgcctctgtgggttctccaggcgccctgccacccacgctgtgccgagctggggctgggcgctctgcctgcatcccccgggccagtcccacggcctccctgcccgttttgagtgtggggaatccgtggctcagagaggttatgcgattgcccaaggtcatcagccgaggtggttcggactaaaaccaggtcccacttcaaagttccctgctttgcagttcctcctgacccccatccttcggcacacccgtgtctcgctcttttgctccccctgtgctccttgtatacaaggacatagtccaaaaacgacctgttttcaaaagaataaatttataaatcagaactgttaggtatacatttagtattcataatatttaacaagttttgtttactgggaaagaaaattatttgaaatccaaccagtcctgagagtccatggtatgtggtggcaataccgtatatacttctctgcctctttttcccaattaatgttttttatttccccattctgtttttttctgacgcagtcctccttccactttttttggtcatctccatctccttttccctacagatacttcacagcagcccctcatgtattgaatccttcgtcaatcccctgtgtggttttccttcctccacacacccctctgtgcacacacccggaaggaaaccccatgttccctttgcacacccttcatgggctgctgttgtcacatgcgtctctcactgcatttatacatttataccaacactttttttgtttgtttctgaggcgaggtctcgcgctgtcccccaggctggagtgcagtggccggctcatagctcactgcagcctcgacctcaaagatcaagcaatcatcccatctcagcttccagagtagctaggactacgggcgtgcaccaccacgcctgatttttaaattttttgtagaggcgggttttcaccatgttgcccaggcttatctcaaactcctgggatcaagtgatcctctcaccttggcctcccaaagtgctgagattacaggcctgagccatcattcctggcctatcctgatacttctgatgatgcttcacttggcagctccattactcctgtgctttctttatagtgccccaggacatactcctcataactcctcaacgtgtacatacaatacctgtttaataaatgtacccccctgggtactagaatgctatgcagcaggtagaaaggatgaggtagtgctacaggtactgccatggaatgatagccatgttatgtatttttgtttgttttttaaaaagtagtgtttgaatggcatcatggttatggtaaaaaagttccatggattcaaaggatatacagtgaaaagttacttccttccacctctgtttagcagttcccagttcctttatccagagacagccactgttttcagttccttctagaaatgttcagtgaatatacaaatatacgtatatttaacccatttttcaaaaagacacataatagcatatatagcattgttaaaaggaaaaaaaatgcaaagcagtatgtaatatcccagttgtgtaaagtatccatactgtatatgtttctgtatgcacaggaaatccctagaatgatactgttcaaacagtagccactagccacgtgtcactctttacattttaaataattaaaattaaataaaaaatgaaaactgaggctgggcacggtgttcacgcctgtaatcccagcactttgggaggtggaggcggacggatcacttgaggtcaggagttggagaccagcctggccaacatggggaaaccctgcctccactaaaaaacacaaaaattagctgggtgtggtggtgcatgcctgtaatcccagctattcgggagactgaggcaggataatcgcttgaacctagggggcagaggttgcagtgagctgagatcgctccactgcactccagcctgggtgacagagtgagactccagctcaaaaaaaaaaaaagaaaaagaaaaaatgaaaactcagtctctcacactagttttaatcatttagccctaaatgcttcatgagattaatcataaacatacttagcgatatgtgaagtagttttagctttgagtcattgccttaacactgtcacatttttcttcctatctaatttagggaaaacaaagaagaagagttaatcgacaaactggaggtggtcacaatgccttccccatcaccaaaaggactgccagtgaagcaatatgctgtgcagtctcagcttcccgtatatgagtggccggatgtgggatctggagaatatgatgttggagtagtggcttcgtttggccgacttttgaatgaggctcttattcttaaatttccctagtaagttttatttgtaaggaaatacagtatagaaaccttggtctttataaatggaccttgtatataaaatgtgataatttgaactctatgctttctgtaatattttctttttttatttttaccattttatttttctgtacatgtttgcttaaagtcaatgaatttctctgccaggttcaggtaactgaagggcctttagaagtagtttatattgtttaaacccaaggaatgctgcaaacacagtctggaacacaataggaaataacatctttctaaagacaggcttataaatttgaatccagtaacttaagatgttccctttctctggtaacagagttgattcataccaggctgctaggcctccagtcacaggtatagacaagaaaagagggtatagaccaccaaaagcaagaccaatccactctgtgttatggtacacgtttcacaattcaaatcacctgtattcgaaggaaaatttacaaaacttttgtaagctgtgtttgttgtaagaaaagggatcactgccattggtaagccagcagctgtaagagcctgtgtcatgttcaagacgcattgaaaaagaccatttgctatgaggccacagagagcattaaatccaacatatgctgatccctcttcaggtagattcctttctgcttgtggaagctggttaatttttctggttatgatatcaaagattgttaagttttccttgatagtattagatttatgattttccatcttgagccttatgctcttctcccagcagctggttggtgcctccccaggtcgtcttcagccatgcccgggctcactgaagcctttgctcaactcgcctgggcacagccatatttggctgacacatgactcggcctgatattttcttttcaagtactaaagaacattttatttgtggcatgagttgtcaaaatgtatttaactccttatcaccctctataggctttcatccaccttcatttaaattccatatatatgctgacaacgcccaaattggtccctctagctcagctcggtccccaaactctagtcccctaatacctactgcctccacagctcttcctggatgtctgatagccactttacattcaagatacccaaagcatctcctaaaatctttatctcaataaatggctactccatcattctagctgcttgcaccaaaatcctggagtcatgcttgatttcttacgtcccatatccaatccatcagtaaatcctattggctctgccttcaaaatctgtgtagaatctgtctgtatctcatcacttccgctgctgccactctcgcctacattactacagaagcctcctaactggtccctacttctgtccttggccctctcagtcttttaccaatccagcagccaaaatgtatttatttatttatttatttatttctattttattgtttaatttagagacagtcttgctgtcacccaggctggagtacagtgttgctatcataactcactgcagccccagactcaagggatcttcctgcctcagccttctgagtagctgagactataggaatgtgccaacacacccagctaactcttttttttttttttttttttttagagacagggatctcgctatgtggcccaacctggtcccaaactcctggctgcatgtgatcttcctgccttggcctcccaaagttttgggattacaggcatgagccactgtaccctgcctcaaagtgatccttttaaaacaagtcagatcatgtcactctgctcaaaatcctctggtaattttctgtcttactcaataaaaggccaggcctaactggcctcccagctgtgccttgaatttgccgagcatttaccttcttcaagatctttgtacttaatgttccctctgcctggaatgcttttctcccatatatatgcgtagttatttccttcttcatgttcttgttcaagtgttttcttgttggtaaagctttctctgatcactactaaaattgtaatatgtccccctcatagtcctctctgctttattttctccatagccctcagcatcatctggcaaaccttgtacatattttgttttttcttgcttatctcccactttttgtacataaactctctgagggcaggattttttttttctgtctggttcactgctgcttgtatgcctaacacttagaacagtgtctgcacatggagtgcgctcagtgaatgttggattgggctgaggatctcctgagcttgggaggttgaggctgcagtgagccatccagcctgggcaacagagcgagaccctgtctcaaaaaaaaattaaaaaaaaaaagaaaaagcttattttaggcagtctgtatgtaaaccaagtgaagtgaggatagttatgtgactaaactataaaattagaattgttcatgagatgcataatagggtttgagtggttctcttatagtcataaatgcattttaaaattttatttaaaaactcccagacatcatgggctgttgtagattttgcgacggagtttcgctcttgttgcccaggctggagtgcaatggcgtgatctcggttcactgcacctctgcctcccaggttcaagcgattctcctgtctcagccttccgagtagctgggattacaggcatgcgccaccacacctggctaattttgtctttttagtagagatggggtttctccatgttggtccggctggtctcaaactcccgatctcaagtgatccgcccgcctcggcctctcaaagtgctgggattacaggcatgagccaccacacccagacagaacatctttagaacagcaaatagttgtcctagctctgtttttaattaaatgtcattggtttcttatggtaagagagtgaatttacatgtaacttttttcctttcaggtgatacgagacttagatttaactgtcagtttttccaaatttctgggaaagtttcctaatgaaaagtagcataatagcttaggtagtggtaacgaagtggtaaagcccactgacatactaatttctacattttctaactcagtggcatattgaatgttcatcccagttgcctcccgagatggcgtggcccagcccctgtaatccatacagtgcttcacggagacacagttactggagtaacaattatgcaaattagacctaaaaggtagcacatattttcctttcttgagatttttgtgatttttaaatgttgatgtcagcctgtttggggggcagtggatgaatgggtggtgctcactaatttctgtgactccagagtgcttcttctgcttttatatcctttctgttttctcctggtttctaacataaaccatatgtcttttggtatttatgcggggtctctttaaagtccatatgtgaattttaatttgttaattgaaataggttatattattaatactcggatttctataaaatacattgtataaatgagagatggatttttgtatgttaattgttttgaatcttggttttgctggccttggtttctaaactatggccaaaaaatttttggaacctgaaataagaatatattgtatatcaatatgcaatataattgtcctaaaacattcattttttcctgtcatacctatagtttagaacaatttagaaacaatttagaacaattttttagaaacaattatttagaattacttgaggagtttattcagtctctgcctgttaccacctaatttccccttagaaaagaataattcacaagttcgcaagaacaacgtggtatctgggatttgctttaacttacttcagaaaacaagagagagagtagatgagacaagagtggcaaaactttggtagttctaaaatctgagccaggcatggtggctcacgcctgtaatcctaaactttgggaggccgaggtgggaggatcacttgagtctgggagttcaagaccagcctgggcaacatataaaaaataaaaaaattagccaggtgtggtgatacacacctgtagtcccagctactcaggaggctgaggtgagaggatctcttcagcctaggaggttgaggcggcagtgaggcaagatcgcaccactgcattccagcctgggcgacggagcaagaacctgtctcaaaaaaaaaaaaaaaaaaatctgaatgatgtgtatatgatgattcattagactgttcactccgtttttgtgaatgtttgcaatttttcacaataaacattttactaaagctcctaggttagaaatagaattaacaaaaacaaaaagcaaaaaaaaattaaataaagcatattgctcatgaaaacctatgaccagtgtttacagagcttgatataaaatgtcagacttgtgggaatgcaaatatacttgcatttacttttttttttttttcttgagacggggtctcactctgtcaccccggctggaatgtagtggggtgatctcagctcactgcaacctctgcttcccaggttcaagcgattctcctgctgcagcctcccgaatagctaggactacaggcacacgctaccatgcccggctaattttttgtatttttagtagagatagggtttcaccatgttggccaggatctcttgacctcgtgatccacccaccttggcctcccaaagtgctgtgattacaggcatgagccactacgcctggccctacttataatcacctatggtgataatctaggcaaaactcttatcctttgaggaagggactatagaaataaataattatgaacttcctaactgtacttccatggaaaataaattctttgccttatgcttttcatatacaaatagagattttttcatgctattactaatgatataatttttctgtaattgtaattaaattcctgatatgcaactgtatcgtttctttgctttagggaaaaataaatttagactctaaacacaggccatattttgttctcccgtctttcaaactgacatatcttccttgctaatgtctaacagccaaattaatagccagtgataaactatctttatttattttttttaagagataggggctagctgtgttgcccaggctggtctcaaactccagggatcaagcaatcctgctgcctcagcctcctgagcaactaggactataggcatgcagaccactgtacccagcttgtatctttttgtgtgtagacaaacattgattcaggaaatggtaatcattgtcattatttgcttttgattttttgctaggtttgatgtaggcccaattctcaaacaagaaactgttcctgtgccacccaagagcactgcaaaggaattggaagcagtgttgtcaagactgggtgccaacatggtataattccccaatatcctactgctttttactcatttagtgggtttcctaagtggttataaaaagaagaacaattttgtgacttctaattttcttaaaaacaaaaaagagtaatttctatctttggcttcctaaaaattagcctggcatttgtgatctcatgtaaatctttgagaatttacaaagagtaagtactgaataaaggctttcaagtgaaacaggtgatcttacatgacctactacatgccatagtgaggtcttagactattcttctcaatttcactctccgcactctggtatgtataccttgcatccctgtcagaatgaactaacagcaattttctaagcgactcttagctttccttccatttctttgcctggcttcagtcatttgcactagaattctgctgaccattctacctatagatgatccttcttttttctgtggctttgtatatataattcattgaaactgcatgagtagagtctgggtaaatgtttaatgactaaacttatgttttccatatgaacgggttaattttatacagaggaatatttttttcccacctgtagagatggtatttcctattctaggcacttacctcacaaatgatcttataatagtgactgccgtttattgaacattggcttgtgttctacaactgttctagatactgtatggactttttctttttaccctctcaactttgaggtagttgttgctgttgattgtttcacagatgatgacattgaaggccagagacaagctaaataacttttccacaatgagacagctggtaggtggtagaactaggacttgaacccagagctgggtgactccatagtacattgtcctgtgaggtttcactgccttggcccccatggggtgagagtgtgtatagccaagcccgggctatcctgatgccaaagcttccacagcattctctagaagtgaatcaatgacctgtactctacagaaagcagaatctctactgaggtttccccaagtagacacctatcctcacagcttaagccaatgtactaccttaccctgccacatagatcttttaaagttataggttcagccttgaagagccaatagtaaagattttttttttaatttgaaaaaagaaaaagaaaaaaagttataggttatttcatggtgctgaattgtaatgtgtttctgcttttgttcttcccttcattttgaatatatcacactcttttttttttttttgtagctcatttcagttttgaaaaatttgcctgaaagtctgagcaatggaaggcagcagccaatggagggggcgacttacggtgagtgaaggctgcagagactctcatctttctaaaggttctgcttgtcacgatagcatctgaacattctgacttcttagctgtacttttcccttaattttgattgagtgcccacttttgtgtgcttttccaaagaatggtagaaagcattctttctccctcttagcatatagcctcatgaaggattgagcatttttttccaacttcttgattttgaaaatattaaatagaaagactggtataataaacaccagtttaccccagagtcaacaattattaatgtttgtccatattttctttctctttatgtatttattacgtgtattttaaattctgcttattcatttggaagtatgaatcatgatctttcatctctaagtagtttagtatgcctttcctaagaaaaatgaacaatttcctgatagcatccaatgttcagttcatatttaagtgttcctaattgtctaaaaatttattttatagttttatttttcaaactaggatttaattgtaattagttgttatgtctctttagtctctaaaaaaaattcctctttttttcctctctctatgtcattgactttttgaagagaccaggccagttgtttgatttgttttcttccagtgttgtttaacttgttccctatctcttatatttcctataattagttctaaaggtttggctggattcaggcttaaagtttttggaaagagtgtgtttcagtgacatttgttttcttcttttttgttttttttagtagagttaggagtataaacatttgtttcagtttgtttttaattttagggattactttttatttttctttatgattaaatgttattttttgaatatgtaaaacatatagctgattcaaaagttaatatacctagagaagtctcacttttgtcccctacagtcttaaggtaccacttgagtaagccaagatatcagactgtactaaagcaagtgaagctaagtttgatcacttggttgagatggtgaccaccagatctttccagtgttaagatgtgttttcccttttgcaattagcaggtaatctgtggggtaattaatactctggcactgtgcagatatcctgttccctaacaacctttcacatgatggttttagtacagattgatattccttgcccaaatgaattatttcactatggattacaaaatggcaattttctaattccttttacatttaatagctggtattgttctggaaagaagagtttttcctcattaattggaggtgaattttagttcatcctaaaatggggacaggggcttaattctttctctttaattagaataagaagttgatgccattaattgccttcaattttggtgtcagatgcgttctttttagtatcatttgacgcgtagattttcattgattgtgttttacagtcataattctttatatttgcccagtgggagccccttaaatttggctcctacattctgttaacactcttcacttcccactagtttggagtgcttccttgcttccaccacagtatgtcccaggctcgcctatgtgtcctctggctcacactgaaatcaaccagtgtgatttccagggagcttttgttcattttagtggggttgataattagagatcatctggtacaacaatgtatggcaagataaggtatcagtggactaaactagaagttatatttttaaaaaatattcaagctcatattgtttatgattcaaatttatcattaaagggttttccttatattttctcacactatctttttttaaatattaacctatttatttgctattcataacatcatttcagcattacaataccaatattactactaagagtaaaaatactaagtaagatttaagatttctttacagttttcctttttgatccttagaatatatcctaaggatatacagtcagattactgccttcaaaacttcctggtaatgattattttttccatgtggttttgttacctagtttcatacatagttaagtttcagttgtttttttttttattttagggattgctttattttcttttatgattaaattttattttttgaatgcataaaatatttacatggttcaaaagttaaaacagcttaaaaaggtacactcatagaagtcctacttccatctctatcttatctaacccgtattcctccctctataggtaacatttttattagtttctgatttagtcttccagtgtttccttttgccaaaataagcaaacacctacatagtgttattttttatttttccttcacaaaaggtggcataaaatacatatttttctgtgcctttgttttttcacttaatagtgtatcatggagactacttcctattagtaagaagagattttcctccttctttcttttttttttaagatagggtctctgttacccaggctgaagtgcaatagtgtgatcatggcttactgcagtctcaacctcccaggctcaagcagtcctcccacctcagcctcccaagtagctgggactacaggtacattccaccatgcctggctaattttttaatttgttgtagagacaagttctaactatgttgctcaggttggtcttgaactcctagactcaagccgtcctcctgccttggcctcccaaaggcatgcctggccttctttttgttttttatggtggcatagttctcagctatgtgaatatatcataattaacccaacagatgtcttattgatgggcatttgggttgtttccaatcttttgctatttcaaataatagtaagattaggaagataacaggcacatggttattcagaatagtatagtaaaactacttggagtagttttaatgtaccttattcctgtcagtaatgttgaagatcttttcatatatttaagaactatttgcatttcttttttctgggtggtagtatatcttttgcccatgttcctatcaacattttggtctttttcttctcagttttttgagtacttatatttcataatagagaaattagtcctctctgagataacttgcaaattcagtttgtcatttgttttttgatttaacttatggcatttctttttgtctttttttttttttttaatttattttgcctaggcatggtagctcatgcatctaatcctagcactttgggaggatgaggcgggtggatcacttaaggttaggagttcgagaccagcctggcaaacatggcaaaaccctgtctctactaaaaatacaaaaaattagccaggcatggtagtgcacgcttgtagtcccagctactcgggaggctgaggcacaagaatctcttgagcctgggaggtggaggttgcagtgagctgagatcacgccactgcactccagcctgggtgacagggcaagaccctatctcaaaaaaaaaaaaaaaagtttgaatagtctcatttcatagttagaagggcattttctactcccaggatgtaaagaagttcacccatgttttattttaatatttatatgattatttatttattatttttacttgatatatggaaaattttgaacataaagaaaagttgagaggttagaatgaattctctggtatctcttattcagtatcaatagctgtcaattcatggacactgaccctgatgttcatttttgctcttggttttatcttgtagcccctaagatttctgctggtaccagttgtataaaatgggaggaacaaacttcagaacaaatattcagactttaccgtgccattggaaatatagtaagttgggaagtcaggttgcagttctacctagttggttttctatgtgtgtaatttgctttctaaatatttttatttaggaataatcccaaataaaaatatcccaaataaaaggttgatcttaggaacaaaacctagaaaacctgaaatttattcttaaaaattctttaagctgtttaaagtgtttatagagaccttagaattcacaaagcacttttaaatatatgtatattgcagtttcacataaccaagttttactatcctacttcataggtgaggggaaagaaatgagatgactaacaggaatgtccagtcactaaataatgaacttaaatcttctcactcctaatcctgtgcttcttccagtatgtctttctgcctttagccaattttttacaatcaaattgttaaatcattgatttctacatatggtacaccaagtgtagtaatataacagtttgttaaaatgtctgagttaaattctcagttcattgataaatttgtggggttttttcctttcatttcaatagctacttgtgttatttgaacactgagcttaccgtatgtgtgtttgtgtgtgtgtgttgttttattttttgagacggggtctagctctgtcacccaggcctggagtacagtggagaaaccttggctcactgcaacctctgcctcccaggctcaagtgagcctcctgtgacagcccctgagtagctgcaaccacaggcacacaccaccacacctggctaatttttgtatttttttgtagagacgaggttttgccatgttgcccaggctggtcttgaactgctgagctcaagtgatccgctcttctcagcctcccaaagtgctgggattacaggcacgagccactgtgcctggccaagtgtgtggtttttaatggaccatctctgttattaatgttgggtaaaatggggaaccaccattggatatctatagcatgctaaattcttcagtaaggaggatcacagactcatgttatagttattatcatcccactttaaagttgaagaaattgaggcttaaagtagataatgaattgttattaagtgttactcgatgtcgtgttgctagttaatgaaagtcagagtcaggttttgaacgagatctatcttacttcaaatcctattattttcctgctgccacagaatggcatcaggaaacaaggaccatagggccagacagtgctgggttccatcttgactctgctacttcctaacgtcgtagactcaggaaagttatttaacctccgagctttagtttgttccttggaatatcagggctggtataatatatttacagcatcttgtacagtatctggcacagaataggtactcattaaatgatagctgctattattcattcattcattaaacaaaatatttattgaaggcctattatgtgtcaagcagtgtactaggtactatagaaacaggtgttgtgggaggacagacaacaagtaagcaaaaaaaaaaaaaaaaaatcaggccaggcatggtggctcacacgtgtaatcccagcactttgggaggctgaggcagatgcatcacctgaggtcaggagtttgagaccagcctggccaacatagtgaaaccctgtctctactaaaaacacacaaaaaaattagctgggcgtggtggcatgcgcctgtaatcccagctactagaaaggctgaggcaagaaaattgcttgaacctaggagacagaggttgcagtgagccaagatcacaccactgcactccagcctgggcgacagagcaagactctgtctcaaaagaaaaaaaaaaaaaaagaccgggcatggtggctcacgcctgttatctcagcactttgggaggccgaggcgggcggatcacctgaggtcaggagttcgagaccagcctgaccaacatggagaaaccccgtctctactaaaaatacaaaaaaattagccagacctagtggcgcatgcctgtaatcctagctacttgggaggctgaggcaggagaattgcttgaacccaggaggtggaggttatgatgagccgagattgcacattgcacaccagcctgggcaacaagagcgaaactccatctcaaaaaaaaaaaaaaaaaaatcaaatagtgtgataaattccttgatgaaaataaaaataggatcatgtgatagaataactggaggttattttagatcggtgatggggaaagcctctttctgacacttaagctgaaatctgaaagacaataaggagccagccatgcctagaacagagaagagcattccaggcagaggaacagctagtacaaaacccaaggtgggctaacccaaagaatcacaagaaaaggaaactccagactgatatccctgaatatagatgcacaagtcctccacagagttagcaaactgaatccagcaacatataaaaaaggattatacatgatgactaagtgggattgttttttgggttttgttttttgttttttgttttttttttttgagatggtgtctcgccctgtcgcctaggctggagcgcaactgtgcagtttcagctcactgcaacctccgccttctgggctctagcaattctacctcagcctcctgagtagctgggattacaggcatgcagcaccatgctcagctcatttttttgtatttttagtagagatggggtttcaccatgttggccaggctgatctcaaactcctgaacttgagtgatccgcccacctcagcctcccaacatgctggcattacaggtgtgagccatcacaccctgccccaagtgggatttatcccaggaatgcaaggttggttcaacatatgaaaatcagtcaatgtaacatatcatattagtagaataaaggacaaaagctacatcactgtctcaatagatgcagaaaaagcatttgacaaaatccaacacatgtaaaaaaacctcaataaactagaaatagaagagcatttcctcaacttgataaaggacatctatgaagaccctgtaactaacatcatacttaatgaaagaagccaagtgcagtggtggacacttgtagtcccaggtattttggaggctgagcgggaggattgcttgaggccaggagttcgagaccagcctggacaatatagccagactttgtctcttaaaaaaaaaagaagaagaaagaaagaaaataaaagaaagacaaagcctttcccttaagatcacaaagaagataaagatgtctgcgctctcaaagttaaatgtcttctattcaactttgttctgttggggcagttagacaagaaaaaagaaacaaaaggcaaccaaacaaaagtttggaaaggaagaagtaaagctgtctctatttgtggatgatatgatctagcatatagaaaatcatgaagaagttccaaaaaaaactattagagctaataaacagtaaagaagacccaagtaaatggaaagaccccagtattcattgattggataaacttagtattgttaagatgtctctactccccaagttgatgtacagattcaacacaattcctaaaaaaaaaatcccaattggcttctttgtacaaattgacaagctgctcctaaaatgtatacagaattgcaaggggcccagaatagccaaaactaacaaaattggaggactcatagttttcagtttcaaaacttgctgtaaaactacagtaaccaagatagtgtggtactggctatagctcattagaatcgaattaagggtctagaaataagccaggcatgatggcttatgcctgtagtcccagcactttgggaggctgaggcaggtggatcacttgaggtcaggagtttgagaccagcctggccaacatggtgaaacctcatctctactaaaaatatttacaaaaattagccagatatggtggtgcacgcttgtagtcccagctactcaggaggctaaggcacgagaatcacttgaacctgggaggtggaggttgcagtgacctgagatcacaccactgcactccagcctgggtgacagagtgagactctgtctcaaatttttttaaaagtctagaaataaacccatacatttatggtcaattgatttttttttctaaaggtagttcccaaaagatagttctttttattattattattattattatactttaagttctagggtacatgtgcacaatgtgcaggtttgttacatatgtatacatgtgccatgttggtgtgctgtacccattaactcatcatttacatgaggtatatctcctaatgctatccctctcccctcccacccacctttttttttttttttttttttttttttttgacaagagtgccaagacaatccaatggagaaagaatagtattctcaataaatggagctgggataactggatgtccacaatcaaaagaatgaatttggaccctatgtcacatcatatgtaaaagttaaagaagctaaatgaatagctaaaactagaaaactcttagaagaaaatataggtgtaaatattcatgacattgaattaggcagtggtttcttagctatgatgccatgaagcataagcaatcagactaaaaatagagaaattggacttcatcaaaattaaaaatagttgtgcttcaaaggacactatcaacaaagtaaaaaagacaggtaggccaggcatggtggctcatgcctataatcccagcactttgggaggctgagacaggaggactgcttgaacccaagaatttgagaccagactgggcaatgtagtgagtccccatcattacaaaaagtaaaaaattagctgggcatcatggtgcacacctgtggtcctagctacttgggaggctggaatgggaggatgcacttgagccagggaggtcgaggctgcagtgagctgtgattgcactactgtgtttcatcctgggtgacaaagtgagaccctgtctcaaaaaaaaaaaaaaaaaaaaaaaaaaaaagacagcttacagaatgggagggaatatttgcaaatcatataactgataagggcctaatatccagagtaaagaattcttacaatgactcagcagtaaaacgacaaataacccaattaaaaatggccaaaaattctgagtaaacatttcttttttgtttgtttttgagatggagtcttgctcttgttgcccaggctggagtgcaatggtgcgaccttggctcattgcaacctctgcctcctggattcaagcgattctcctgcctcagcctccctagtagctgggattataggcaagcgccaccacgcccggctaatttttgtacttttagtagagacggggtttcaccatgttgacctggctggtctcgaactcctatcctcaggtgatccacctgcctcagcctccctaagtgctgggattacaggcatgagccactgccctggccctgagtagacatttgtttcaagcagatacataatatgaatggccagtaagcatataaaagatcagcaacttcatctgtctttagggatatgcaaatcagaaccacaatgagataccacttcacacccattaggatggctataattcaaaaaacagacaaaaactagtgttggcaaggatgtggagaaatttggaaacttcatacattcatggtaccatgtttacctcttaaaaatggtgcaacctgtgtggaaaacagtttggcagttcctcaaaaagtgaaacacagaagtatcttatgacccagcatttcctttcctaggtttatactcaagagaattggaaacattgtgctcacacaaaaatgtgtacccgaatcttcatagcagcattattcagaatggccaaaaagtgaaaacaacccaaatatccaactgagggatgcgttaaaaaaatgtggtatatagccatacggtggaatattattaatactcagccataaccataatcacatgcttatgacatggatgaacctgaaaaatatgctaagtgaaaaaaccctgtcacaacagactacatatgttattattccatttatatgaaatgtccaaaataggcaaatccataggctggaggagagaggataatgggaattttctgataatggatgtgcgttttttctgggagagagaggtaatgaaaatgttctaaaaattaggcaagaaaaaaacgagtgacattggttgaatgaccctgagtctactaaaaaccactgacttggaagcttcaaaagggtgaattttctggtatgtgaattacatctcaataaagctgtcaaaaaacaaaacaaaacaaaaaaacaacccaagatggaaaagagttggacatgtttgagggacagaaatgaggctggtgtggctggagcatagctggcaagatggagagtagctaaggtgaggggagaagcaagattgagtaggattgacatcagagggccacggcaggggagtaatgggattaggtatgtacattcttaaaaggttgccctggctgctgctagagagtggagtggaggtcagttagggaattggttgggtgtggtggctcacacctgtaataccagcactttgggaggccaagaagagtgaatcgcttgagccctggagttccagaccagtctgggcaacatggtgaaaccctgtctctacaaaatatacaaaaattagctaggtattgtgggatgcacctgtagtcccagctactcgggaggctgaggtaggaggatcacttgaccctgggaggttgaggctgcagtgagctgtgattccaccactgcactccagcctggatgacagagcaagatccggtctttaaaaaaaaaaattaaaaaaataaaaagaagctgctgcgactgtagccagatgacagatgatggcagtttggaacaatgataatggtggataaaaagaagtggacatccagactatgcttggagatagagtcagcggaatttgctgatggaatctgggaaattagagatagataaattaggatcattcatagatttttggcttgagaaactgggtgaatagtggaaccatttaattgagatgaggatgtctggggaggaacatttgggaagagaaatcaatagttttggccatgttaagtttgacatatattaagttagaagacgttcatatggagatatcaagtagacaacttcctgagatgcaatttaggccagtagcttgaaatctcttggcacctataacttactacatgatgattcttaccctctgcggtttatcttccctgtacatggagaaaagctttgtgctataaaagactgagccagaaggtggggtttggttcctagagttgccctttactaatgagaggaaggcccttgtctttgagcttctgctttttttacctctaaagtgggattaatgaccatgtacacaactggcaagatcaaaggaaatgaactaggtgaatgtaaattcatgcaaacatactattttggcagtaatgatggcagacaccaaaatgattatattcttaccatccctttcctttctacaatgctctgatgataaggtgagctttacctcccgaagaacaagactatattctgagtatgtacctagcatgtttattactctcagtaaatagaaatcttttttagtcagtaagcatgtttcaaaaatattttgagttatttaaaagaaaaaaattgcacatatgaaaatcgtttcagaacttttattgaagcgggcaaaagaaaagtgagctagcaagttatagaagaggctatgacatagatacagttatgaacttgttcttcaaattcatttacttatttgatttaatgttcaaattattacaacaacctaactcttctgaaagttaaataccctctttaaggggtgtcataaaaagagcactgcactgagaatcagaaaacagaagccagtcctggctttgctactaactagctgggtccaaccttgggaaaatagctgcatttctctgagcctcactctcttcatgtatgaaatagaggattgaactacagtctggaaataaatgcattcaattcagaaattttagagaacttatttcctggtgtgtgttaaattttattaacatttaaatcaggctgtaggatctcaggtatgttggaaatgtgttacatgataaaggtggtatttcatactggagggaagggtaagatggattatctagtaaatagtattgggataactggccaaccattggtgggggaagccctcaaatcctatcttttaaaatcatagtaagtgctatattataacaatgcatatgtagttaacaatactgtatggtatacttacaatttgttaattgagcacatttttcttatgtgttttttaccataataaaaaaatcaaaatatagatggatcaaggatttaaatataaaaagtaaaatcacaaggactataaaaaagcacaactgaataatttgacaatatttaataatcttaaagtgtggggtaggcctttttaagtatgatatgaaccaccaaagtaatgagagaaaagacttagaaatataattatgaaaataaaaaacttatgcatggaaaaaatggctgtccccaagattaaaagtcaacaaactgaggaaaatattcacaacacatgtaagagttaaaaggctaatttcctaaatatagaaaatatttttgcaaattaatgagataaccatcccagttttaaaaaatataaccaaagggcataaataggcaggttacagataaataaattaaaagtgcacataaatatatggacagcttctcagcttcgctaataataaacagcaagaggttatcatatttttttctcacttatccaggcagtttagcaataaaatgttgatgctgtttaacccacgcattccactttaaaaacaaaaaaccccaaaactattatccagaaatgtgtaagccctcaaagatatatcgacaaggttattaccctagtttatagtgttataaatagcaataaattgaaaataacaaatatctatcataaaggtagttgcataaattacatattcataaaatgggttactgtgcagcagatagagtgaaattgataagtatgtactgatgaaacatcaatgctttatggtcacataacaaaagtccttgtaaaacagtattgatgcaggactttttgctccttaactcagctaaaatctgggttcttgtctcacaaccaggaaaaattaggcacgtggacacattgaaaggtgaggagagtggaatttattaaaagaaagctctcagcaaaaaaagagggggtcctgccaacaggctcccacctcacagattgaataccaggccaccacacaggagctgaagaggccaggctcttcccctgcataaggcagaaattcctggtggctccacccccattcttccagtgctcatgcgggcccttagtctgagccacgccaccttgatttatttcctttactgtgcatgtgttaagggacagaacttttcaccatggacatgttgagtcaagcccactgtgcataatgacctgggtggcatttggctgtctcctgtctctatcactgtgttctagatttttataataatatttgtagaaaaaaatacagggaaatgcacatcaaacttaacagtcgttacctatagggatgggaataaatacagaatatcactttctaaaattttttaacataatgtaatgcttgcattttttataaggataataaatttttaattggaaatattagtatattagatataaacattgattttaaagtaacatttaagatcttataaatcggccgggcgcggtggctcacgcctgtaatcccagcactttgggaggctaaggcgggcggatcatgaggtcaggagatagagaccatcgtggctaacatggtgaaaccccgtctctacttaaaatacaaaaaattagccgggcatggttgcaggcgcctgtagtcccagctactcgggaggctgaagcaggagaatggcgtgaacccgggaggcggagcttgcagtgagccaagatcacaccactgcactccagcctggtgacacaacgagactccgtctcaaaaaaaaaaaaaaaaagatcttataaatcctggaaacactgatgtagagagtcatgtttatggtctgttccatcaaacttagtgactgagttcccaattcctctaattgaaagaaaagtccagattaacacaaaatagtagttgaaaagggtttgggagttgagtgtattcctttatcataccttctttaattttacttgcagattccgttgcagacgctctggatggcgaataccattaaacttctggatttggtagaagttaacagttcagtccttgctggtactaacttttgaatagctaacatggaagctgttttcactgtagtgtatctggaaatacgtctgttttatcatatgtcacaattactaaaaataacttttagtttgtttcagttcagtaattataatactttacattcacttattgtcttattctttgcaacactcattctcatatattttctcatttaatcattacaagaacaggccaggcgcggtggctcacgcctgtaattccagcactttgggaggccaaggtgggtggatcagctgaggtcaggagttcgagactagcctgactgacatggtgaagccccgtctctactaaatacaaaaatttagctgggcatggtggcacatgcctgtaatcccagctacttgggaggctgaggcaggagagtcacttgaacctgggaggcagaggtttcagtgagccaagattgcgccgctgcactccagcctgggcaatgagtgaaactccatttcaaaaaaaaaaaaaaaaaatcattacaggaccctggggagtaggcaaagcagtgttcctatcccattttaagctctgtgatttcctgccttaaggttttcagagagtgcagaatgactcgattagtttcattctggtgaatattataatgaaaatatctgggcaaatcagtgaaaatctaggccagagtgtattcatacttcatgccacaagtccattctgaggcccatcagcatcctgccaatacggtggacagaaggaatgtgagccacagaggaagctggtttaatttagaggtagttggagttccccaggaacctaggaattaggatttgtttgggcagggatgaaagggccagcctaaatcctaaacatcctatgtatttccccctgttggctagttatttcaccaaagcgctaacacaaaacttgtagattcagcattttaggtggtcactgggtaaaggaattatagctttgtatgtgcatgggaagctttcctttgggtttctgatgtacagagagcactgtggtttccttgtaagttttggtttacaaagtcaacatcagcaaatgtgttctctccggtatcagtactgcctcccaagatgttttttgatttttaagaagtactatgaagttgcataattgcttttttctcttgtatatcttttcttttttccattcttcagatccaaaattaacgggacaggctcttattccaggatcagtaatataccacaaacagtcacaaatactattggtttattgcaaggtatgtttttcattagtttcaagttatcatagttgttttactatgttatagtctgtatcatttattatttttagttggaacttcacttaactgcctgtccatagattgggtcaggagatcatttaattttcttaagaaatagtgaagtctctagcataattttttgaaagtgatgaagttttgccaaggcattattattactcaaagaaagaagattcagtaacttgagtgctttcttaaaagaacacgtgtattttcagtagcccaatttaattaacagctcttgtgcttggtaacataaaagatagtcatatcaaaatatctgactgaactactacaggacacacatatcctacttgcttttactgcttaacagtagtaaagaggagatttctgaactttttaaaataactttggaatcattattgttttataagatcatggtgtgttctgagaagtgttctacattccttccatttcctaggtattttgcatcatatggtgttcatgtgagatatttcatacttaagagtgtttagccgggcaaggtggctcacacatgttatcccagcactttgggaggctgaggcgggtggatcacctgaggtcgggaattcgagaccagactgaccaacatagagaaaccccgtctttactaacagtacaaaaattagtcgagcgtggtggcagacgcctgtaatcccagctacttgggaggcttaggcaggagaatcgcttgagcccgggaagcggaggttgtggtgagccgagatcgtgccatcacactccagcctgggcaataagagcgaaactccatctcaaaaaaaaaaagaaaatgtttaaaatgtgtgatagattgatctgacctacagactgtgaatacaaaactccatcaacctctctttgtctctcgccagcttattctggaacagtgttggatgcatatgtcttgctgtccttttctgggtctatatatatgtatttcccttttttttttttttttttttttgagatggagttgcccaggctggagtgtagtggtgtgatctcagctcactgcaacctccacctcctgggttcaagcgattctcctgcctccgtcttccaagtagctgggattacaggcacccgccaccacgcctggctaatttttgtatttttgtaaggacggggtttcgccatgttggtcaggctggtcacgaattcctgacctcaggtgatccacccgcctcggcctcccaaagtgctgggattacaggcgtgagccaccacgcctggcctatatgtgtatttcatgttacataccttttattctgctccctttgtatttaaatatttatacagatctatacatttgttatcgctccttggtaataagcttttaatttcagtgtcaaaaaccgcaatgacttttgcaccaacctaatagagtcaaggaattctacatgttacttagtgtagtgctgtttgcagctaggcatttagtaaagatttgttggtttgtttgtttccatgataaaaattttataaactaatatttacttggctttttagttttgccacccctgcctattcactatttgtattttgccctttaggatggttggattggtgttcgatcagtgatgctcaagaaatcactaacagctactgacttctacaatggatatttgcacccctggtaccagaaaaattcccaagctcaaccaagccaatgcagatttcagactctcagacttccaacaaagaagaagcagaaaaaaactgttgctatgcaacaatgcattgagtagttaggaagaagatggataaaaacctattacatatttgtaatttattaaaaaccttatttacaaggaattatctggacttttttttttttttttttttttgagacagagtctcactctgtcacccaggctggaatccagtggcactatctcagctcactgcaacctccgcctcccaggttcaagcaattctcctgcctcagcctcctgagtagctgggattacaggcacacgccaccacacgcagctaatttttgtatttttagtagagatggggtttcaccatgttgttcaggctggtctcgaactcctgaccttgtgatctgcccacctcagcctcccaaagtgctatgattacagacgtgagccaccgtgcctggcctggaattatctggactttcaaagaagatggcattattataagaagagaagattattgccgaaaagatggattgcctcactttccactttttatgtaacagtagttaaaaaacagctttttttttacttgaattacaaaaaagtttaaataaaacttgtatttatgatacgaaa

SEQ ID NO: 1019 - DNA, 4167 bp, Homo sapiens
  misc_feature (268): n equals a,t,g, or c
  misc_feature (269): n equals a,t,g, or c
  misc_feature (270): n equals a,t,g, or c
  misc_feature (271): n equals a,t,g, or c
  misc_feature (272): n equals a,t,g, or c
  misc_feature (273): n equals a,t,g, or c
  misc_feature (274): n equals a,t,g, or c
  misc_feature (275): n equals a,t,g, or c
  misc_feature (276): n equals a,t,g, or c
  misc_feature (277): n equals a,t,g, or c
  misc_feature (278): n equals a,t,g, or c
  misc_feature (279): n equals a,t,g, or c
  misc_feature (280): n equals a,t,g, or c
  misc_feature (281): n equals a,t,g, or c
  misc_feature (282): n equals a,t,g, or c
  misc_feature (283): n equals a,t,g, or c
  misc_feature (284): n equals a,t,g, or c
  misc_feature (285): n equals a,t,g, or c
  misc_feature (286): n equals a,t,g, or c
  misc_feature (287): n equals a,t,g, or c
  misc_feature (288): n equals a,t,g, or c
  misc_feature (289): n equals a,t,g, or c
  misc_feature (290): n equals a,t,g, or c
  misc_feature (291): n equals a,t,g, or c
  misc_feature (292): n equals a,t,g, or c
  misc_feature (293): n equals a,t,g, or c
  misc_feature (294): n equals a,t,g, or c
  misc_feature (295): n equals a,t,g, or c
  misc_feature (296): n equals a,t,g, or c
  misc_feature (297): n equals a,t,g, or c
  misc_feature (298): n equals a,t,g, or c
  misc_feature (299): n equals a,t,g, or c
  misc_feature (300): n equals a,t,g, or c
  misc_feature (301): n equals a,t,g, or c
  misc_feature (302): n equals a,t,g, or c
  misc_feature (303): n equals a,t,g, or c
  misc_feature (304): n equals a,t,g, or c
  misc_feature (305): n equals a,t,g, or c
  misc_feature (306): n equals a,t,g, or c
  misc_feature (307): n equals a,t,g, or c
  misc_feature (308): n equals a,t,g, or c
  misc_feature (309): n equals a,t,g, or c
  misc_feature (310): n equals a,t,g, or c
  misc_feature (311): n equals a,t,g, or c
  misc_feature (312): n equals a,t,g, or c
  misc_feature (313): n equals a,t,g, or c
  misc_feature (314): n equals a,t,g, or c
  misc_feature (315): n equals a,t,g, or c
  misc_feature (316): n equals a,t,g, or c
  misc_feature (317): n equals a,t,g, or c
  misc_feature (318): n equals a,t,g, or c
  misc_feature (319): n equals a,t,g, or c
  misc_feature (320): n equals a,t,g, or c
  misc_feature (321): n equals a,t,g, or c
  misc_feature (322): n equals a,t,g, or c
  misc_feature (323): n equals a,t,g, or c
  misc_feature (324): n equals a,t,g, or c
  misc_feature (325): n equals a,t,g, or c
  misc_feature (326): n equals a,t,g, or c
  misc_feature (327): n equals a,t,g, or c
  misc_feature (328): n equals a,t,g, or c
  misc_feature (329): n equals a,t,g, or c
  misc_feature (330): n equals a,t,g, or c
  misc_feature (331): n equals a,t,g, or c
  misc_feature (332): n equals a,t,g, or c
  misc_feature (333): n equals a,t,g, or c
  misc_feature (334): n equals a,t,g, or c
  misc_feature (335): n equals a,t,g, or c
  misc_feature (336): n equals a,t,g, or c
  misc_feature (337): n equals a,t,g, or c
  misc_feature (338): n equals a,t,g, or c
  misc_feature (339): n equals a,t,g, or c
  misc_feature (340): n equals a,t,g, or c
  misc_feature (341): n equals a,t,g, or c
  misc_feature (342): n equals a,t,g, or c
  misc_feature (343): n equals a,t,g, or c
  misc_feature (344): n equals a,t,g, or c
  misc_feature (345): n equals a,t,g, or c
  misc_feature (346): n equals a,t,g, or c
  misc_feature (347): n equals a,t,g, or c
  misc_feature (348): n equals a,t,g, or c
  misc_feature (349): n equals a,t,g, or c
  misc_feature (350): n equals a,t,g, or c
  misc_feature (351): n equals a,t,g, or c
  misc_feature (352): n equals a,t,g, or c
  misc_feature (353): n equals a,t,g, or c
  misc_feature (354): n equals a,t,g, or c
  misc_feature (355): n equals a,t,g, or c
  misc_feature (356): n equals a,t,g, or c
  misc_feature (357): n equals a,t,g, or c
  misc_feature (358): n equals a,t,g, or c
  misc_feature (359): n equals a,t,g, or c
  misc_feature (360): n equals a,t,g, or c
  misc_feature (361): n equals a,t,g, or c
  misc_feature (362): n equals a,t,g, or c
  misc_feature (363): n equals a,t,g, or c
  misc_feature (364): n equals a,t,g, or c
  misc_feature (365): n equals a,t,g, or c
  misc_feature (366): n equals a,t,g, or c
  misc_feature (367): n equals a,t,g, or c
  misc_feature (368): n equals a,t,g, or c
  misc_feature (369): n equals a,t,g, or c
  misc_feature (370): n equals a,t,g, or c
  misc_feature (371): n equals a,t,g, or c
  misc_feature (372): n equals a,t,g, or c
  misc_feature (373): n equals a,t,g, or c
  misc_feature (374): n equals a,t,g, or c
  misc_feature (375): n equals a,t,g, or c
  misc_feature (376): n equals a,t,g, or c
  misc_feature (377): n equals a,t,g, or c
  misc_feature (378): n equals a,t,g, or c
  misc_feature (379): n equals a,t,g, or c
  misc_feature (380): n equals a,t,g, or c
  misc_feature (381): n equals a,t,g, or c
  misc_feature (382): n equals a,t,g, or c
  misc_feature (383): n equals a,t,g, or c
  misc_feature (384): n equals a,t,g, or c
  misc_feature (385): n equals a,t,g, or c
  misc_feature (386): n equals a,t,g, or c
  misc_feature (387): n equals a,t,g, or c
  misc_feature (388): n equals a,t,g, or c
  misc_feature (389): n equals a,t,g, or c
  misc_feature (390): n equals a,t,g, or c
  misc_feature (391): n equals a,t,g, or c
  misc_feature (392): n equals a,t,g, or c
  misc_feature (393): n equals a,t,g, or c
  misc_feature (394): n equals a,t,g, or c
  misc_feature (395): n equals a,t,g, or c
  misc_feature (396): n equals a,t,g, or c
  misc_feature (397): n equals a,t,g, or c
  misc_feature (398): n equals a,t,g, or c
  misc_feature (399): n equals a,t,g, or c
  misc_feature (400): n equals a,t,g, or c
  misc_feature (401): n equals a,t,g, or c
  misc_feature (402): n equals a,t,g, or c
  misc_feature (403): n equals a,t,g, or c
  misc_feature (404): n equals a,t,g, or c
  misc_feature (405): n equals a,t,g, or c
  misc_feature (406): n equals a,t,g, or c
  misc_feature (407): n equals a,t,g, or c
  misc_feature (408): n equals a,t,g, or c
  misc_feature (409): n equals a,t,g, or c
  misc_feature (410): n equals a,t,g, or c
  misc_feature (411): n equals a,t,g, or c
  misc_feature (412): n equals a,t,g, or c
  misc_feature (413): n equals a,t,g, or c
  misc_feature (414): n equals a,t,g, or c
  misc_feature (415): n equals a,t,g, or c
  misc_feature (416): n equals a,t,g, or c
  misc_feature (417): n equals a,t,g, or c
  misc_feature (418): n equals a,t,g, or c
  misc_feature (419): n equals a,t,g, or c
  misc_feature (420): n equals a,t,g, or c
  misc_feature (421): n equals a,t,g, or c
  misc_feature (422): n equals a,t,g, or c
  misc_feature (423): n equals a,t,g, or c
  misc_feature (424): n equals a,t,g, or c
  misc_feature (425): n equals a,t,g, or c
  misc_feature (426): n equals a,t,g, or c
  misc_feature (427): n equals a,t,g, or c
  misc_feature (428): n equals a,t,g, or c
  misc_feature (429): n equals a,t,g, or c
  misc_feature (430): n equals a,t,g, or c
  misc_feature (431): n equals a,t,g, or c
  misc_feature (432): n equals a,t,g, or c
  misc_feature (433): n equals a,t,g, or c
  misc_feature (434): n equals a,t,g, or c
  misc_feature (435): n equals a,t,g, or c
  misc_feature (436): n equals a,t,g, or c
  misc_feature (437): n equals a,t,g, or c
  misc_feature (438): n equals a,t,g, or c
  misc_feature (439): n equals a,t,g, or c
  misc_feature (440): n equals a,t,g, or c
  misc_feature (441): n equals a,t,g, or c
  misc_feature (442): n equals a,t,g, or c
  misc_feature (443): n equals a,t,g, or c
  misc_feature (444): n equals a,t,g, or c
  misc_feature (445): n equals a,t,g, or c
  misc_feature (446): n equals a,t,g, or c
  misc_feature (447): n equals a,t,g, or c
  misc_feature (448): n equals a,t,g, or c
  misc_feature (449): n equals a,t,g, or c
  misc_feature (450): n equals a,t,g, or c
  misc_feature (451): n equals a,t,g, or c
  misc_feature (452): n equals a,t,g, or c
  misc_feature (453): n equals a,t,g, or c
  misc_feature (454): n equals a,t,g, or c
  misc_feature (455): n equals a,t,g, or c
  misc_feature (456): n equals a,t,g, or c
  misc_feature (457): n equals a,t,g, or c
  misc_feature (458): n equals a,t,g, or c
  misc_feature (459): n equals a,t,g, or c
  misc_feature (460): n equals a,t,g, or c
  misc_feature (461): n equals a,t,g, or c
  misc_feature (462): n equals a,t,g, or c
  misc_feature (463): n equals a,t,g, or c
  misc_feature (464): n equals a,t,g, or c
  misc_feature (465): n equals a,t,g, or c
  misc_feature (466): n equals a,t,g, or c
  misc_feature (467): n equals a,t,g, or c
  misc_feature (468): n equals a,t,g, or c
  misc_feature (469): n equals a,t,g, or c
  misc_feature (470): n equals a,t,g, or c
  misc_feature (471): n equals a,t,g, or c
  misc_feature (472): n equals a,t,g, or c
  misc_feature (473): n equals a,t,g, or c
  misc_feature (474): n equals a,t,g, or c
  misc_feature (475): n equals a,t,g, or c
  misc_feature (476): n equals a,t,g, or c
  misc_feature (477): n equals a,t,g, or c
  misc_feature (478): n equals a,t,g, or c
  misc_feature (479): n equals a,t,g, or c
  misc_feature (480): n equals a,t,g, or c
  misc_feature (481): n equals a,t,g, or c
  misc_feature (482): n equals a,t,g, or c
  misc_feature (483): n equals a,t,g, or c
  misc_feature (484): n equals a,t,g, or c
  misc_feature (485): n equals a,t,g, or c
  misc_feature (486): n equals a,t,g, or c
  misc_feature (487): n equals a,t,g, or c
  misc_feature (488): n equals a,t,g, or c
  misc_feature (489): n equals a,t,g, or c
  misc_feature (490): n equals a,t,g, or c
  misc_feature (491): n equals a,t,g, or c
  misc_feature (492): n equals a,t,g, or c
  misc_feature (493): n equals a,t,g, or c
  misc_feature (494): n equals a,t,g, or c
  misc_feature (495): n equals a,t,g, or c
  misc_feature (496): n equals a,t,g, or c
  misc_feature (497): n equals a,t,g, or c
  misc_feature (498): n equals a,t,g, or c
  misc_feature (499): n equals a,t,g, or c
  misc_feature (500): n equals a,t,g, or c
  misc_feature (501): n equals a,t,g, or c
  misc_feature (502): n equals a,t,g, or c
  misc_feature (503): n equals a,t,g, or c
  misc_feature (504): n equals a,t,g, or c
  misc_feature (505): n equals a,t,g, or c
  misc_feature (506): n equals a,t,g, or c
  misc_feature (507): n equals a,t,g, or c
  misc_feature (508): n equals a,t,g, or c
  misc_feature (509): n equals a,t,g, or c
  misc_feature (510): n equals a,t,g, or c
  misc_feature (511): n equals a,t,g, or c
  misc_feature (512): n equals a,t,g, or c
  misc_feature (513): n equals a,t,g, or c
  misc_feature (514): n equals a,t,g, or c
  misc_feature (515): n equals a,t,g, or c
  misc_feature (516): n equals a,t,g, or c
  misc_feature (517): n equals a,t,g, or c
  misc_feature (518): n equals a,t,g, or c
  misc_feature (519): n equals a,t,g, or c
  misc_feature (520): n equals a,t,g, or c
  misc_feature (521): n equals a,t,g, or c
  misc_feature (522): n equals a,t,g, or c
  misc_feature (523): n equals a,t,g, or c
  misc_feature (524): n equals a,t,g, or c
  misc_feature (525): n equals a,t,g, or c
  misc_feature (526): n equals a,t,g, or c
  misc_feature (527): n equals a,t,g, or c
  misc_feature (528): n equals a,t,g, or c
  misc_feature (529): n equals a,t,g, or c
  misc_feature (530): n equals a,t,g, or c
  misc_feature (531): n equals a,t,g, or c
  misc_feature (532): n equals a,t,g, or c
  misc_feature (533): n equals a,t,g, or c
  misc_feature (534): n equals a,t,g, or c
  misc_feature (535): n equals a,t,g, or c
  misc_feature (536): n equals a,t,g, or c
  misc_feature (537): n equals a,t,g, or c
  misc_feature (538): n equals a,t,g, or c
  misc_feature (539): n equals a,t,g, or c
  misc_feature (540): n equals a,t,g, or c
  misc_feature (541): n equals a,t,g, or c
  misc_feature (542): n equals a,t,g, or c
  misc_feature (543): n equals a,t,g, or c
  misc_feature (544): n equals a,t,g, or c
  misc_feature (545): n equals a,t,g, or c
  misc_feature (546): n equals a,t,g, or c
  misc_feature (547): n equals a,t,g, or c
  misc_feature (548): n equals a,t,g, or c
  misc_feature (549): n equals a,t,g, or c
  misc_feature (550): n equals a,t,g, or c
  misc_feature (551): n equals a,t,g, or c
  misc_feature (552): n equals a,t,g, or c
  misc_feature (553): n equals a,t,g, or c
  misc_feature (554): n equals a,t,g, or c
  misc_feature (555): n equals a,t,g, or c
  misc_feature (556): n equals a,t,g, or c
  misc_feature (557): n equals a,t,g, or c
  misc_feature (558): n equals a,t,g, or c
  misc_feature (559): n equals a,t,g, or c
  misc_feature (560): n equals a,t,g, or c
  misc_feature (561): n equals a,t,g, or c
  misc_feature (562): n equals a,t,g, or c
  misc_feature (563): n equals a,t,g, or c
  misc_feature (564): n equals a,t,g, or c
  misc_feature (565): n equals a,t,g, or c
  misc_feature (566): n equals a,t,g, or c
  misc_feature (567): n equals a,t,g, or c
  misc_feature (568): n equals a,t,g, or c
  misc_feature (569): n equals a,t,g, or c
  misc_feature (570): n equals a,t,g, or c
  misc_feature (571): n equals a,t,g, or c
  misc_feature (572): n equals a,t,g, or c
  misc_feature (573): n equals a,t,g, or c
  misc_feature (574): n equals a,t,g, or c
  misc_feature (575): n equals a,t,g, or c
  misc_feature (576): n equals a,t,g, or c
  misc_feature (577): n equals a,t,g, or c
  misc_feature (578): n equals a,t,g, or c
  misc_feature (579): n equals a,t,g, or c
  misc_feature (580): n equals a,t,g, or c
  misc_feature (581): n equals a,t,g, or c
  misc_feature (582): n equals a,t,g, or c
  misc_feature (583): n equals a,t,g, or c
  misc_feature (584): n equals a,t,g, or c
  misc_feature (585): n equals a,t,g, or c
  misc_feature (586): n equals a,t,g, or c
  misc_feature (587): n equals a,t,g, or c
  misc_feature (588): n equals a,t,g, or c
  misc_feature (589): n equals a,t,g, or c
  misc_feature (590): n equals a,t,g, or c
  misc_feature (591): n equals a,t,g, or c
  misc_feature (592): n equals a,t,g, or c
  misc_feature (593): n equals a,t,g, or c
  misc_feature (594): n equals a,t,g, or c
  misc_feature (595): n equals a,t,g, or c
  misc_feature (596): n equals a,t,g, or c
  misc_feature (597): n equals a,t,g, or c
  misc_feature (598): n equals a,t,g, or c
  misc_feature (599): n equals a,t,g, or c
  misc_feature (600): n equals a,t,g, or c
  misc_feature (601): n equals a,t,g, or c
  misc_feature (602): n equals a,t,g, or c
  misc_feature (603): n equals a,t,g, or c
  misc_feature (604): n equals a,t,g, or c
  misc_feature (605): n equals a,t,g, or c
  misc_feature (606): n equals a,t,g, or c
  misc_feature (607): n equals a,t,g, or c
  misc_feature (608): n equals a,t,g, or c
  misc_feature (609): n equals a,t,g, or c
  misc_feature (610): n equals a,t,g, or c
  misc_feature (611): n equals a,t,g, or c
  misc_feature (612): n equals a,t,g, or c
  misc_feature (613): n equals a,t,g, or c
  misc_feature (614): n equals a,t,g, or c
  misc_feature (615): n equals a,t,g, or c
  misc_feature (616): n equals a,t,g, or c
  misc_feature (617): n equals a,t,g, or c
  misc_feature (618): n equals a,t,g, or c
  misc_feature (619): n equals a,t,g, or c
  misc_feature (620): n equals a,t,g, or c
  misc_feature (621): n equals a,t,g, or c
  misc_feature (622): n equals a,t,g, or c
  misc_feature (623): n equals a,t,g, or c
  misc_feature (624): n equals a,t,g, or c
  misc_feature (625): n equals a,t,g, or c
  misc_feature (626): n equals a,t,g, or c
  misc_feature (627): n equals a,t,g, or c
  misc_feature (628): n equals a,t,g, or c
  misc_feature (629): n equals a,t,g, or c
  misc_feature (630): n equals a,t,g, or c
  misc_feature (631): n equals a,t,g, or c
  misc_feature (632): n equals a,t,g, or c
  misc_feature (633): n equals a,t,g, or c
  misc_feature (634): n equals a,t,g, or c
  misc_feature (635): n equals a,t,g, or c
  misc_feature (636): n equals a,t,g, or c
  misc_feature (637): n equals a,t,g, or c
  misc_feature (638): n equals a,t,g, or c
  misc_feature (639): n equals a,t,g, or c
  misc_feature (640): n equals a,t,g, or c
  misc_feature (641): n equals a,t,g, or c
  misc_feature (642): n equals a,t,g, or c
  misc_feature (643): n equals a,t,g, or c
  misc_feature (644): n equals a,t,g, or c
  misc_feature (645): n equals a,t,g, or c
  misc_feature (646): n equals a,t,g, or c
  misc_feature (647): n equals a,t,g, or c
  misc_feature (648): n equals a,t,g, or c
  misc_feature (649): n equals a,t,g, or c
  misc_feature (650): n equals a,t,g, or c
  misc_feature (651): n equals a,t,g, or c
  misc_feature (652): n equals a,t,g, or c
  misc_feature (653): n equals a,t,g, or c
  misc_feature (654): n equals a,t,g, or c
  misc_feature (655): n equals a,t,g, or c
  misc_feature (656): n equals a,t,g, or c
  misc_feature (657): n equals a,t,g, or c
  misc_feature (658): n equals a,t,g, or c
  misc_feature (659): n equals a,t,g, or c
  misc_feature (660): n equals a,t,g, or c
  misc_feature (661): n equals a,t,g, or c
  misc_feature (662): n equals a,t,g, or c
  misc_feature (663): n equals a,t,g, or c
  misc_feature (664): n equals a,t,g, or c
  misc_feature (665): n equals a,t,g, or c
  misc_feature (666): n equals a,t,g, or c
  misc_feature (667): n equals a,t,g, or c
  misc_feature (668): n equals a,t,g, or c
  misc_feature (669): n equals a,t,g, or c
  misc_feature (670): n equals a,t,g, or c
  misc_feature (671): n equals a,t,g, or c
  misc_feature (672): n equals a,t,g, or c
  misc_feature (673): n equals a,t,g, or c
  misc_feature (674): n equals a,t,g, or c
  misc_feature (675): n equals a,t,g, or c
  misc_feature (676): n equals a,t,g, or c
  misc_feature (677): n equals a,t,g, or c
  misc_feature (678): n equals a,t,g, or c
  misc_feature (679): n equals a,t,g, or c
  misc_feature (680): n equals a,t,g, or c
  misc_feature (681): n equals a,t,g, or c
  misc_feature (682): n equals a,t,g, or c
  misc_feature (683): n equals a,t,g, or c
  misc_feature (684): n equals a,t,g, or c
  misc_feature (685): n equals a,t,g, or c
  misc_feature (686): n equals a,t,g, or c
  misc_feature (687): n equals a,t,g, or c
  misc_feature (688): n equals a,t,g, or c
  misc_feature (689): n equals a,t,g, or c
  misc_feature (690): n equals a,t,g, or c
  misc_feature (691): n equals a,t,g, or c
  misc_feature (692): n equals a,t,g, or c
  misc_feature (693): n equals a,t,g, or c
  misc_feature (694): n equals a,t,g, or c
  misc_feature (695): n equals a,t,g, or c
  misc_feature (696): n equals a,t,g, or c
  misc_feature (697): n equals a,t,g, or c
  misc_feature (698): n equals a,t,g, or c
  misc_feature (699): n equals a,t,g, or c
  misc_feature (700): n equals a,t,g, or c
  misc_feature (701): n equals a,t,g, or c
  misc_feature (702): n equals a,t,g, or c
  misc_feature (703): n equals a,t,g, or c
  misc_feature (704): n equals a,t,g, or c
  misc_feature (705): n equals a,t,g, or c
  misc_feature (706): n equals a,t,g, or c
  misc_feature (707): n equals a,t,g, or c
  misc_feature (708): n equals a,t,g, or c
  misc_feature (709): n equals a,t,g, or c
  misc_feature (710): n equals a,t,g, or c
  misc_feature (711): n equals a,t,g, or c
  misc_feature (712): n equals a,t,g, or c
  misc_feature (713): n equals a,t,g, or c
  misc_feature (714): n equals a,t,g, or c
  misc_feature (715): n equals a,t,g, or c
  misc_feature (716): n equals a,t,g, or c
  misc_feature (717): n equals a,t,g, or c
  misc_feature (718): n equals a,t,g, or c
  misc_feature (719): n equals a,t,g, or c
  misc_feature (720): n equals a,t,g, or c
  misc_feature (721): n equals a,t,g, or c
  misc_feature (722): n equals a,t,g, or c
  misc_feature (723): n equals a,t,g, or c
  misc_feature (724): n equals a,t,g, or c
  misc_feature (725): n equals a,t,g, or c
  misc_feature (726): n equals a,t,g, or c
  misc_feature (727): n equals a,t,g, or c
  misc_feature (728): n equals a,t,g, or c
  misc_feature (729): n equals a,t,g, or c
  misc_feature (730): n equals a,t,g, or c
  misc_feature (731): n equals a,t,g, or c
  misc_feature (732): n equals a,t,g, or c
  misc_feature (733): n equals a,t,g, or c
  misc_feature (734): n equals a,t,g, or c
  misc_feature (735): n equals a,t,g, or c
  misc_feature (736): n equals a,t,g, or c
  misc_feature (737): n equals a,t,g, or c
  misc_feature (738): n equals a,t,g, or c
  misc_feature (739): n equals a,t,g, or c
  misc_feature (740): n equals a,t,g, or c
  misc_feature (741): n equals a,t,g, or c
  misc_feature (742): n equals a,t,g, or c
  misc_feature (743): n equals a,t,g, or c
  misc_feature (744): n equals a,t,g, or c
  misc_feature (745): n equals a,t,g, or c
  misc_feature (746): n equals a,t,g, or c
  misc_feature (747): n equals a,t,g, or c
  misc_feature (748): n equals a,t,g, or c
  misc_feature (749): n equals a,t,g, or c
  misc_feature (750): n equals a,t,g, or c
  misc_feature (751): n equals a,t,g, or c
  misc_feature (752): n equals a,t,g, or c
  misc_feature (753): n equals a,t,g, or c
  misc_feature (754): n equals a,t,g, or c
  misc_feature (755): n equals a,t,g, or c
  misc_feature (756): n equals a,t,g, or c
  misc_feature (757): n equals a,t,g, or c
  misc_feature (758): n equals a,t,g, or c
  misc_feature (759): n equals a,t,g, or c
  misc_feature (760): n equals a,t,g, or c
  misc_feature (761): n equals a,t,g, or c
  misc_feature (762): n equals a,t,g, or c
  misc_feature (763): n equals a,t,g, or c
  misc_feature (764): n equals a,t,g, or c
  misc_feature (765): n equals a,t,g, or c
  misc_feature (766): n equals a,t,g, or c
  misc_feature (767): n equals a,t,g, or c
  misc_feature (768): n equals a,t,g, or c
  misc_feature (769): n equals a,t,g, or c
  misc_feature (770): n equals a,t,g, or c
  misc_feature (771): n equals a,t,g, or c
  misc_feature (772): n equals a,t,g, or c
  misc_feature (773): n equals a,t,g, or c
  misc_feature (774): n equals a,t,g, or c
  misc_feature (775): n equals a,t,g, or c
  misc_feature (776): n equals a,t,g, or c
  misc_feature (777): n equals a,t,g, or c
  misc_feature (778): n equals a,t,g, or c
  misc_feature (779): n equals a,t,g, or c
  misc_feature (780): n equals a,t,g, or c
  misc_feature (781): n equals a,t,g, or c
  misc_feature (782): n equals a,t,g, or c
  misc_feature (783): n equals a,t,g, or c
  misc_feature (784): n equals a,t,g, or c
  misc_feature (785): n equals a,t,g, or c
  misc_feature (786): n equals a,t,g, or c
  misc_feature (787): n equals a,t,g, or c
  misc_feature (788): n equals a,t,g, or c
  misc_feature (789): n equals a,t,g, or c
  misc_feature (790): n equals a,t,g, or c
  misc_feature (791): n equals a,t,g, or c
  misc_feature (792): n equals a,t,g, or c
  misc_feature (793): n equals a,t,g, or c
  misc_feature (794): n equals a,t,g, or c
  misc_feature (795): n equals a,t,g, or c
  misc_feature (796): n equals a,t,g, or c
  misc_feature (797): n equals a,t,g, or c
  misc_feature (798): n equals a,t,g, or c
  misc_feature (799): n equals a,t,g, or c
  misc_feature (800): n equals a,t,g, or c
  misc_feature (801): n equals a,t,g, or c
  misc_feature (802): n equals a,t,g, or c
  misc_feature (803): n equals a,t,g, or c
  misc_feature (804): n equals a,t,g, or c
  misc_feature (805): n equals a,t,g, or c
  misc_feature (806): n equals a,t,g, or c
  misc_feature (807): n equals a,t,g, or c
  misc_feature (808): n equals a,t,g, or c
  misc_feature (809): n equals a,t,g, or c
  misc_feature (810): n equals a,t,g, or c
  misc_feature (811): n equals a,t,g, or c
  misc_feature (812): n equals a,t,g, or c
  misc_feature (813): n equals a,t,g, or c
  misc_feature (814): n equals a,t,g, or c
  misc_feature (815): n equals a,t,g, or c
  misc_feature (816): n equals a,t,g, or c
  misc_feature (817): n equals a,t,g, or c
  misc_feature (818): n equals a,t,g, or c
  misc_feature (819): n equals a,t,g, or c
  misc_feature (820): n equals a,t,g, or c
  misc_feature (821): n equals a,t,g, or c
  misc_feature (822): n equals a,t,g, or c
  misc_feature (823): n equals a,t,g, or c
  misc_feature (824): n equals a,t,g, or c
  misc_feature (825): n equals a,t,g, or c
  misc_feature (826): n equals a,t,g, or c
  misc_feature (827): n equals a,t,g, or c
  misc_feature (828): n equals a,t,g, or c
  misc_feature (829): n equals a,t,g, or c
  misc_feature (830): n equals a,t,g, or c
  misc_feature (831): n equals a,t,g, or c
  misc_feature (832): n equals a,t,g, or c
  misc_feature (833): n equals a,t,g, or c
  misc_feature (834): n equals a,t,g, or c
  misc_feature (835): n equals a,t,g, or c
  misc_feature (836): n equals a,t,g, or c
  misc_feature (837): n equals a,t,g, or c
  misc_feature (838): n equals a,t,g, or c
  misc_feature (839): n equals a,t,g, or c
  misc_feature (840): n equals a,t,g, or c
  misc_feature (841): n equals a,t,g, or c
  misc_feature (842): n equals a,t,g, or c
  misc_feature (843): n equals a,t,g, or c
  misc_feature (844): n equals a,t,g, or c
  misc_feature (845): n equals a,t,g, or c
  misc_feature (846): n equals a,t,g, or c
  misc_feature (847): n equals a,t,g, or c
  misc_feature (848): n equals a,t,g, or c
  misc_feature (849): n equals a,t,g, or c
  misc_feature (850): n equals a,t,g, or c
  misc_feature (851): n equals a,t,g, or c
  misc_feature (852): n equals a,t,g, or c
  misc_feature (853): n equals a,t,g, or c
  misc_feature (854): n equals a,t,g, or c
  misc_feature (855): n equals a,t,g, or c
  misc_feature (856): n equals a,t,g, or c
  misc_feature (857): n equals a,t,g, or c
  misc_feature (858): n equals a,t,g, or c
  misc_feature (859): n equals a,t,g, or c
  misc_feature (860): n equals a,t,g, or c
  misc_feature (861): n equals a,t,g, or c
  misc_feature (862): n equals a,t,g, or c
  misc_feature (863): n equals a,t,g, or c
  misc_feature (864): n equals a,t,g, or c
  misc_feature (865): n equals a,t,g, or c
  misc_feature (866): n equals a,t,g, or c
  misc_feature (867): n equals a,t,g, or c
  misc_feature (868): n equals a,t,g, or c
  misc_feature (869): n equals a,t,g, or c
  misc_feature (870): n equals a,t,g, or c
  misc_feature (871): n equals a,t,g, or c
  misc_feature (872): n equals a,t,g, or c
  misc_feature (873): n equals a,t,g, or c
  misc_feature (874): n equals a,t,g, or c
  misc_feature (875): n equals a,t,g, or c
  misc_feature (876): n equals a,t,g, or c
  misc_feature (877): n equals a,t,g, or c
  misc_feature (878): n equals a,t,g, or c
  misc_feature (879): n equals a,t,g, or c
  misc_feature (880): n equals a,t,g, or c
  misc_feature (881): n equals a,t,g, or c
  misc_feature (882): n equals a,t,g, or c
  misc_feature (883): n equals a,t,g, or c
  misc_feature (884): n equals a,t,g, or c
  misc_feature (885): n equals a,t,g, or c
  misc_feature (886): n equals a,t,g, or c
  misc_feature (887): n equals a,t,g, or c
  misc_feature (888): n equals a,t,g, or c
  misc_feature (889): n equals a,t,g, or c
  misc_feature (890): n equals a,t,g, or c
  misc_feature (891): n equals a,t,g, or c
  misc_feature (892): n equals a,t,g, or c
  misc_feature (893): n equals a,t,g, or c
  misc_feature (894): n equals a,t,g, or c
  misc_feature (895): n equals a,t,g, or c
  misc_feature (896): n equals a,t,g, or c
  misc_feature (897): n equals a,t,g, or c
  misc_feature (898): n equals a,t,g, or c
  misc_feature (899): n equals a,t,g, or c
  misc_feature (900): n equals a,t,g, or c
  misc_feature (901): n equals a,t,g, or c
  misc_feature (902): n equals a,t,g, or c
  misc_feature (903): n equals a,t,g, or c
  misc_feature (904): n equals a,t,g, or c
  misc_feature (905): n equals a,t,g, or c
  misc_feature (906): n equals a,t,g, or c
  misc_feature (907): n equals a,t,g, or c
  misc_feature (908): n equals a,t,g, or c
  misc_feature (909): n equals a,t,g, or c
  misc_feature (910): n equals a,t,g, or c
  misc_feature (911): n equals a,t,g, or c
  misc_feature (912): n equals a,t,g, or c
  misc_feature (913): n equals a,t,g, or c
  misc_feature (914): n equals a,t,g, or c
  misc_feature (915): n equals a,t,g, or c
  misc_feature (916): n equals a,t,g, or c
  misc_feature (917): n equals a,t,g, or c
  misc_feature (918): n equals a,t,g, or c
  misc_feature (919): n equals a,t,g, or c
  misc_feature (920): n equals a,t,g, or c
  misc_feature (921): n equals a,t,g, or c
  misc_feature (922): n equals a,t,g, or c
  misc_feature (923): n equals a,t,g, or c
  misc_feature (924): n equals a,t,g, or c
  misc_feature (925): n equals a,t,g, or c
  misc_feature (926): n equals a,t,g, or c
  misc_feature (927): n equals a,t,g, or c
  misc_feature (928): n equals a,t,g, or c
  misc_feature (929): n equals a,t,g, or c
  misc_feature (930): n equals a,t,g, or c
  misc_feature (931): n equals a,t,g, or c
  misc_feature (932): n equals a,t,g, or c
  misc_feature (933): n equals a,t,g, or c
  misc_feature (934): n equals a,t,g, or c
  misc_feature (935): n equals a,t,g, or c
  misc_feature (936): n equals a,t,g, or c
  misc_feature (937): n equals a,t,g, or c
  misc_feature (938): n equals a,t,g, or c
  misc_feature (939): n equals a,t,g, or c
  misc_feature (940): n equals a,t,g, or c
  misc_feature (941): n equals a,t,g, or c
  misc_feature (942): n equals a,t,g, or c
  misc_feature (943): n equals a,t,g, or c
  misc_feature (944): n equals a,t,g, or c
  misc_feature (945): n equals a,t,g, or c
  misc_feature (946): n equals a,t,g, or c
  misc_feature (947): n equals a,t,g, or c
  misc_feature (948): n equals a,t,g, or c
  misc_feature (949): n equals a,t,g, or c
  misc_feature (950): n equals a,t,g, or c
  misc_feature (951): n equals a,t,g, or c
  misc_feature (952): n equals a,t,g, or c
  misc_feature (953): n equals a,t,g, or c
  misc_feature (954): n equals a,t,g, or c
  misc_feature (955): n equals a,t,g, or c
  misc_feature (956): n equals a,t,g, or c
  misc_feature (957): n equals a,t,g, or c
  misc_feature (958): n equals a,t,g, or c
  misc_feature (959): n equals a,t,g, or c
  misc_feature (960): n equals a,t,g, or c
  misc_feature (961): n equals a,t,g, or c
  misc_feature (962): n equals a,t,g, or c
  misc_feature (963): n equals a,t,g, or c
  misc_feature (964): n equals a,t,g, or c
  misc_feature (965): n equals a,t,g, or c
  misc_feature (966): n equals a,t,g, or c
  misc_feature (967): n equals a,t,g, or c
  misc_feature (968): n equals a,t,g, or c
  misc_feature (969): n equals a,t,g, or c
  misc_feature (970): n equals a,t,g, or c
  misc_feature (971): n equals a,t,g, or c
  misc_feature (972): n equals a,t,g, or c
  misc_feature (973): n equals a,t,g, or c
  misc_feature (974): n equals a,t,g, or c
  misc_feature (975): n equals a,t,g, or c
  misc_feature (976): n equals a,t,g, or c
  misc_feature (977): n equals a,t,g, or c
  misc_feature (978): n equals a,t,g, or c
  misc_feature (979): n equals a,t,g, or c
  misc_feature (980): n equals a,t,g, or c
  misc_feature (981): n equals a,t,g, or c
  misc_feature (982): n equals a,t,g, or c
  misc_feature (983): n equals a,t,g, or c
  misc_feature (984): n equals a,t,g, or c
  misc_feature (985): n equals a,t,g, or c
  misc_feature (986): n equals a,t,g, or c
  misc_feature (987): n equals a,t,g, or c
  misc_feature (988): n equals a,t,g, or c
  misc_feature (989): n equals a,t,g, or c
  misc_feature (990): n equals a,t,g, or c
  misc_feature (991): n equals a,t,g, or c
  misc_feature (992): n equals a,t,g, or c
  misc_feature (993): n equals a,t,g, or c
  misc_feature (994): n equals a,t,g, or c
  misc_feature (995): n equals a,t,g, or c
  misc_feature (996): n equals a,t,g, or c
  misc_feature (997): n equals a,t,g, or c
  misc_feature (998): n equals a,t,g, or c
  misc_feature (999): n equals a,t,g, or c
  misc_feature (1000): n equals a,t,g, or c
  misc_feature (1001): n equals a,t,g, or c
  misc_feature (1002): n equals a,t,g, or c
  misc_feature (1003): n equals a,t,g, or c
  misc_feature (1004): n equals a,t,g, or c
  misc_feature (1005): n equals a,t,g, or c
  misc_feature (1006): n equals a,t,g, or c
  misc_feature (1007): n equals a,t,g, or c
  misc_feature (1008): n equals a,t,g, or c
  misc_feature (1009): n equals a,t,g, or c
  misc_feature (1010): n equals a,t,g, or c
  misc_feature (1011): n equals a,t,g, or c
  misc_feature (1012): n equals a,t,g, or c
  misc_feature (1013): n equals a,t,g, or c
  misc_feature (1014): n equals a,t,g, or c
  misc_feature (1015): n equals a,t,g, or c
  misc_feature (1016): n equals a,t,g, or c
  misc_feature (1017): n equals a,t,g, or c
  misc_feature (1018): n equals a,t,g, or c
  misc_feature (1019): n equals a,t,g, or c
  misc_feature (1020): n equals a,t,g, or c
  misc_feature (1021): n equals a,t,g, or c
  misc_feature (1022): n equals a,t,g, or c
  misc_feature (1023): n equals a,t,g, or c
  misc_feature (1024): n equals a,t,g, or c
  misc_feature (1025): n equals a,t,g, or c
  misc_feature (1026): n equals a,t,g, or c
  misc_feature (1027): n equals a,t,g, or c
  misc_feature (1028): n equals a,t,g, or c
  misc_feature (1029): n equals a,t,g, or c
  misc_feature (1030): n equals a,t,g, or c
  misc_feature (1031): n equals a,t,g, or c
  misc_feature (1032): n equals a,t,g, or c
  misc_feature (1033): n equals a,t,g, or c
  misc_feature (1034): n equals a,t,g, or c
  misc_feature (1035): n equals a,t,g, or c
  misc_feature (1036): n equals a,t,g, or c
  misc_feature (1037): n equals a,t,g, or c
  misc_feature (1038): n equals a,t,g, or c
  misc_feature (1039): n equals a,t,g, or c
  misc_feature (1040): n equals a,t,g, or c
  misc_feature (1041): n equals a,t,g, or c
  misc_feature (1042): n equals a,t,g, or c
  misc_feature (1043): n equals a,t,g, or c
  misc_feature (1044): n equals a,t,g, or c
  misc_feature (1045): n equals a,t,g, or c
  misc_feature (1046): n equals a,t,g, or c
  misc_feature (1047): n equals a,t,g, or c
  misc_feature (1048): n equals a,t,g, or c
  misc_feature (1049): n equals a,t,g, or c
  misc_feature (1050): n equals a,t,g, or c
  misc_feature (1051): n equals a,t,g, or c
  misc_feature (1052): n equals a,t,g, or c
  misc_feature (1053): n equals a,t,g, or c
  misc_feature (1054): n equals a,t,g, or c
  misc_feature (1055): n equals a,t,g, or c
  misc_feature (1056): n equals a,t,g, or c
  misc_feature (1057): n equals a,t,g, or c
  misc_feature (1058): n equals a,t,g, or c
  misc_feature (1059): n equals a,t,g, or c
  misc_feature (1060): n equals a,t,g, or c
  misc_feature (1061): n equals a,t,g, or c
  misc_feature (1062): n equals a,t,g, or c
  misc_feature (1063): n equals a,t,g, or c
  misc_feature (1064): n equals a,t,g, or c
  misc_feature (1065): n equals a,t,g, or c
  misc_feature (1066): n equals a,t,g, or c
  misc_feature (1067): n equals a,t,g, or c
  misc_feature (1068): n equals a,t,g, or c
  misc_feature (1069): n equals a,t,g, or c
  misc_feature (1070): n equals a,t,g, or c
  misc_feature (1071): n equals a,t,g, or c
  misc_feature (1072): n equals a,t,g, or c
  misc_feature (1073): n equals a,t,g, or c
  misc_feature (1074): n equals a,t,g, or c
  misc_feature (1075): n equals a,t,g, or c
  misc_feature (1076): n equals a,t,g, or c
  misc_feature (1077): n equals a,t,g, or c
  misc_feature (1078): n equals a,t,g, or c
  misc_feature (1079): n equals a,t,g, or c
  misc_feature (1080): n equals a,t,g, or c
  misc_feature (1081): n equals a,t,g, or c
  misc_feature (1082): n equals a,t,g, or c
  misc_feature (1083): n equals a,t,g, or c
  misc_feature (1084): n equals a,t,g, or c
  misc_feature (1085): n equals a,t,g, or c
  misc_feature (1086): n equals a,t,g, or c
  misc_feature (1087): n equals a,t,g, or c
  misc_feature (1088): n equals a,t,g, or c
  misc_feature (1089): n equals a,t,g, or c
  misc_feature (1090): n equals a,t,g, or c
  misc_feature (1091): n equals a,t,g, or c
  misc_feature (1092): n equals a,t,g, or c
  misc_feature (1093): n equals a,t,g, or c
  misc_feature (1094): n equals a,t,g, or c
  misc_feature (1095): n equals a,t,g, or c
  misc_feature (1096): n equals a,t,g, or c
  misc_feature (1097): n equals a,t,g, or c
  misc_feature (1098): n equals a,t,g, or c
  misc_feature (1099): n equals a,t,g, or c
  misc_feature (1100): n equals a,t,g, or c
  misc_feature (1101): n equals a,t,g, or c
  misc_feature (1102): n equals a,t,g, or c
  misc_feature (1103): n equals a,t,g, or c
  misc_feature (1104): n equals a,t,g, or c
  misc_feature (1105): n equals a,t,g, or c
  misc_feature (1106): n equals a,t,g, or c
  misc_feature (1107): n equals a,t,g, or c
  misc_feature (1108): n equals a,t,g, or c
  misc_feature (1109): n equals a,t,g, or c
  misc_feature (1110): n equals a,t,g, or c
  misc_feature (1111): n equals a,t,g, or c
  misc_feature (1112): n equals a,t,g, or c
  misc_feature (1113): n equals a,t,g, or c
  misc_feature (1114): n equals a,t,g, or c
  misc_feature (1115): n equals a,t,g, or c
  misc_feature (1116): n equals a,t,g, or c
  misc_feature (1117): n equals a,t,g, or c
  misc_feature (1118): n equals a,t,g, or c
  misc_feature (1119): n equals a,t,g, or c
  misc_feature (1120): n equals a,t,g, or c
  misc_feature (1121): n equals a,t,g, or c
  misc_feature (1122): n equals a,t,g, or c
  misc_feature (1123): n equals a,t,g, or c
  misc_feature (1124): n equals a,t,g, or c
  misc_feature (1125): n equals a,t,g, or c
  misc_feature (1126): n equals a,t,g, or c
  misc_feature (1127): n equals a,t,g, or c
  misc_feature (1128): n equals a,t,g, or c
  misc_feature (1129): n equals a,t,g, or c
  misc_feature (1130): n equals a,t,g, or c
  misc_feature (1131): n equals a,t,g, or c
  misc_feature (1132): n equals a,t,g, or c
  misc_feature (1133): n equals a,t,g, or c
  misc_feature (1134): n equals a,t,g, or c
  misc_feature (1135): n equals a,t,g, or c
  misc_feature (1136): n equals a,t,g, or c
  misc_feature (1137): n equals a,t,g, or c
  misc_feature (1138): n equals a,t,g, or c
  misc_feature (1139): n equals a,t,g, or c
  misc_feature (1140): n equals a,t,g, or c
  misc_feature (1141): n equals a,t,g, or c
  misc_feature (1142): n equals a,t,g, or c
  misc_feature (1143): n equals a,t,g, or c
  misc_feature (1144): n equals a,t,g, or c
  misc_feature (1145): n equals a,t,g, or c
  misc_feature (1146): n equals a,t,g, or c
  misc_feature (1147): n equals a,t,g, or c
  misc_feature (1148): n equals a,t,g, or c
  misc_feature (1149): n equals a,t,g, or c
  misc_feature (1150): n equals a,t,g, or c
  misc_feature (1151): n equals a,t,g, or c
  misc_feature (1152): n equals a,t,g, or c
  misc_feature (1153): n equals a,t,g, or c
  misc_feature (1154): n equals a,t,g, or c
  misc_feature (1155): n equals a,t,g, or c
  misc_feature (1156): n equals a,t,g, or c
  misc_feature (1157): n equals a,t,g, or c
  misc_feature (1158): n equals a,t,g, or c
  misc_feature (1159): n equals a,t,g, or c
  misc_feature (1160): n equals a,t,g, or c
  misc_feature (1161): n equals a,t,g, or c
  misc_feature (1162): n equals a,t,g, or c
  misc_feature (1163): n equals a,t,g, or c
  misc_feature (1164): n equals a,t,g, or c
  misc_feature (1165): n equals a,t,g, or c
  misc_feature (1166): n equals a,t,g, or c
  misc_feature (1167): n equals a,t,g, or c
  misc_feature (1168): n equals a,t,g, or c
  misc_feature (1169): n equals a,t,g, or c
  misc_feature (1170): n equals a,t,g, or c
  misc_feature (1171): n equals a,t,g, or c
  misc_feature (1172): n equals a,t,g, or c
  misc_feature (1173): n equals a,t,g, or c
  misc_feature (1174): n equals a,t,g, or c
  misc_feature (1175): n equals a,t,g, or c
  misc_feature (1176): n equals a,t,g, or c
  misc_feature (1177): n equals a,t,g, or c
  misc_feature (1178): n equals a,t,g, or c
  misc_feature (1179): n equals a,t,g, or c
  misc_feature (1180): n equals a,t,g, or c
  misc_feature (1181): n equals a,t,g, or c
  misc_feature (1182): n equals a,t,g, or c
  misc_feature (1183): n equals a,t,g, or c
  misc_feature (1184): n equals a,t,g, or c
  misc_feature (1185): n equals a,t,g, or c
  misc_feature (1186): n equals a,t,g, or c
  misc_feature (1187): n equals a,t,g, or c
  misc_feature (1188): n equals a,t,g, or c
  misc_feature (1189): n equals a,t,g, or c
  misc_feature (1190): n equals a,t,g, or c
  misc_feature (1191): n equals a,t,g, or c
  misc_feature (1192): n equals a,t,g, or c
  misc_feature (1193): n equals a,t,g, or c
  misc_feature (1194): n equals a,t,g, or c
  misc_feature (1195): n equals a,t,g, or c
  misc_feature (1196): n equals a,t,g, or c
  misc_feature (1197): n equals a,t,g, or c
  misc_feature (1198): n equals a,t,g, or c
  misc_feature (1199): n equals a,t,g, or c
  misc_feature (1200): n equals a,t,g, or c
  misc_feature (1201): n equals a,t,g, or c
  misc_feature (1202): n equals a,t,g, or c
  misc_feature (1203): n equals a,t,g, or c
  misc_feature (1204): n equals a,t,g, or c
  misc_feature (1205): n equals a,t,g, or c
  misc_feature (1206): n equals a,t,g, or c
  misc_feature (1207): n equals a,t,g, or c
  misc_feature (1208): n equals a,t,g, or c
  misc_feature (1209): n equals a,t,g, or c
  misc_feature (1210): n equals a,t,g, or c
  misc_feature (1211): n equals a,t,g, or c
  misc_feature (1212): n equals a,t,g, or c
  misc_feature (1213): n equals a,t,g, or c
  misc_feature (1214): n equals a,t,g, or c
  misc_feature (1215): n equals a,t,g, or c
  misc_feature (1216): n equals a,t,g, or c
  misc_feature (1217): n equals a,t,g, or c
  misc_feature (1218): n equals a,t,g, or c
  misc_feature (1219): n equals a,t,g, or c
  misc_feature (1220): n equals a,t,g, or c
  misc_feature (1221): n equals a,t,g, or c
  misc_feature (1222): n equals a,t,g, or c
  misc_feature (1223): n equals a,t,g, or c
  misc_feature (1224): n equals a,t,g, or c
  misc_feature (1225): n equals a,t,g, or c
  misc_feature (1226): n equals a,t,g, or c
  misc_feature (1227): n equals a,t,g, or c
  misc_feature (1228): n equals a,t,g, or c
  misc_feature (1229): n equals a,t,g, or c
  misc_feature (1230): n equals a,t,g, or c
  misc_feature (1231): n equals a,t,g, or c
  misc_feature (1232): n equals a,t,g, or c
  misc_feature (1233): n equals a,t,g, or c
  misc_feature (1234): n equals a,t,g, or c
  misc_feature (1235): n equals a,t,g, or c
  misc_feature (1236): n equals a,t,g, or c
  misc_feature (1237): n equals a,t,g, or c
  misc_feature (1238): n equals a,t,g, or c
  misc_feature (1239): n equals a,t,g, or c
  misc_feature (1240): n equals a,t,g, or c
  misc_feature (1241): n equals a,t,g, or c
  misc_feature (1242): n equals a,t,g, or c
  misc_feature (1243): n equals a,t,g, or c
  misc_feature (1244): n equals a,t,g, or c
  misc_feature (1245): n equals a,t,g, or c
  misc_feature (1246): n equals a,t,g, or c
  misc_feature (1247): n equals a,t,g, or c
  misc_feature (1248): n equals a,t,g, or c
  misc_feature (1249): n equals a,t,g, or c
  misc_feature (1250): n equals a,t,g, or c
  misc_feature (1251): n equals a,t,g, or c
  misc_feature (1252): n equals a,t,g, or c
  misc_feature (1253): n equals a,t,g, or c
  misc_feature (1254): n equals a,t,g, or c
  misc_feature (1255): n equals a,t,g, or c
  misc_feature (1256): n equals a,t,g, or c
  misc_feature (1257): n equals a,t,g, or c
  misc_feature (1258): n equals a,t,g, or c
  misc_feature (1259): n equals a,t,g, or c
  misc_feature (1260): n equals a,t,g, or c
  misc_feature (1261): n equals a,t,g, or c
  misc_feature (1262): n equals a,t,g, or c
  misc_feature (1263): n equals a,t,g, or c
  misc_feature (1264): n equals a,t,g, or c
  misc_feature (1265): n equals a,t,g, or c
  misc_feature (1266): n equals a,t,g, or c
  misc_feature (1267): n equals a,t,g, or c
ttttttttttttttttttttcttttctttttttttttttttttttttcttttttttttttttttttttttttttttcttttttttttttctttttttttttttttttttttctcttctttttttttttttttttttttttctttttttttttcttctttctttttctctcttttttttttcttttttcttttttcttttttttttttttttttcttttttttttcttctttttttttttttctttttttttttttttttttttttccnnnnnnnnnnnnnnnnnnnnnnnnnnnnnnnnnnnnnnnnnnnnnnnnnnnnnnnnnnnnnnnnnnnnnnnnnnnnnnnnnnnnnnnnnnnnnnnnnnnnnnnnnnnnnnnnnnnnnnnnnnnnnnnnnnnnnnnnnnnnnnnnnnnnnnnnnnnnnnnnnnnnnnnnnnnnnnnnnnnnnnnnnnnnnnnnnnnnnnnnnnnnnnnnnnnnnnnnnnnnnnnnnnnnnnnnnnnnnnnnnnnnnnnnnnnnnnnnnnnnnnnnnnnnnnnnnnnnnnnnnnnnnnnnnnnnnnnnnnnnnnnnnnnnnnnnnnnnnnnnnnnnnnnnnnnnnnnnnnnnnnnnnnnnnnnnnnnnnnnnnnnnnnnnnnnnnnnnnnnnnnnnnnnnnnnnnnnnnnnnnnnnnnnnnnnnnnnnnnnnnnnnnnnnnnnnnnnnnnnnnnnnnnnnnnnnnnnnnnnnnnnnnnnnnnnnnnnnnnnnnnnnnnnnnnnnnnnnnnnnnnnnnnnnnnnnnnnnnnnnnnnnnnnnnnnnnnnnnnnnnnnnnnnnnnnnnnnnnnnnnnnnnnnnnnnnnnnnnnnnnnnnnnnnnnnnnnnnnnnnnnnnnnnnnnnnnnnnnnnnnnnnnnnnnnnnnnnnnnnnnnnnnnnnnnnnnnnnnnnnnnnnnnnnnnnnnnnnnnnnnnnnnnnnnnnnnnnnnnnnnnnnnnnnnnnnnnnnnnnnnnnnnnnnnnnnnnnnnnnnnnnnnnnnnnnnnnnnnnnnnnnnnnnnnnnnnnnnnnnnnnnnnnnnnnnnnnnnnnnnnnnnnnnnnnnnnnnnnnnnnnnnnnnnnnnnnnnnnnnnnnnnnnnnnnnnnnnnnnnnnnnnnnnnnnnnnnnnnnnnnnnnnnnnnnnnnnnnnnnnnnnnnnnnnnnnnnnnnnnnnnnnnnnnnnnnnnnnnnnnnnnnnnnnnnnnnnnnnnnnnnnnnnnnnnnnnnnnnnnnnnnnnnnnnnnnnnnnnnnntcactacaacctccacctcccagccgcctgccttggcctcccaaagtgccgagattgcagcctctgcccggccgccaccccgtctgggaagtgaggagtgtctctgcctggccgcccatcgtctgggatgtgaggagcccctctgcccggccgcccagtctgggaagtgaggagcgtctccgcccggccgccatcccatctaggaagtgaggagcgcctcttcccagccgccatcacatctaggaagtgaggagcgtctctgcccggccgcccatcgtctgagatgtggggagcgcctctgccccaccgccccatctgggatgtgaggagcgcctctgcccggccgagaccccgtctgggaggtgaggagcgtctctgcccggccgccccgtctgagaagtgaggagaccctctgcctggcaaccaccccgtctgagaagtgaggagcccctccgcccggcagctgccccgtctgagaagtgaggagcctctccgcccagcagccaccccatctgggaagtgaggagcatctccgcccggcagccaccccatccgggagggaggtgagggggggtcagccccccgcccggccagctgccccatccgggagggaggtggggggtcagccccccgcccggccagccgtgccatccgggagggaggtgggggggtcagccccctgcccggccagccgcccggtccgggaggtgaggggcgcctctgcccggccgcccctactgggaagtgaggagcccctctgcccggccagccgccccgtccgggagggaggtgggggggtcagccctccgcccggccagccgccccgtctgggaggtgaggggcgcctctgcccggccgcccctactgggaagtgaggagcccctctgcccggccagccgccccgtccgggagggaggtgggggggtcggccccccgcccggccagccgccccgtccgggagggaggtgggggtgtcggccccccgcccggccagccgccccgtccgggagggaggtggggggggtcagcccccctgcccggccagccgccccgtccgggaggtgaggggcgcctctgcccggccacccctactgggaagtgaggagcccctctgcccggccagccgccccgtccgcgagggaggtgggggggtcagccccccgcccggccagccgccccgtccgggagggaggtggggggggtcagcccccctgcccggccagccgccccgtccgggagggaggtggggggggtcagcccccctgcccggccagccgccccgtccgggaggtgaggggcgcctctgcccggccgcccctactgggaagtgaggagcccctctgcccggccagctgccccgtccgcgagggaggtgggggggtcagccccccgcccggccagccgccccgtccgggagggaggtggggggggtcagcccccctgcccggccagccgccccgtccgggaggtgaggggcgcctctgcccggccgcccctactgggaagtgaggagcccctctgcccggccagccgccccgtccgcgagggaggtgggggggtcagccccccgcccggccagccgccccgtccgggagggaggtggggggggtcagcccccctgcccggccagccgccccgtccgggaggtgaggggcgcctctgcccggccgcccctactgggaagtgaggagcccctctgcctggccagccgccccgtccgggagggaggtggggggtcagccccccgaccggccagccgccccgtccgggagggaggtgggggggtcagccccccgcccggccagccgccccgcccaggaagtgaggggcgcttctgcccggccgcccctactgggaagtgaggagcccctctgcccggccaccaccccgtctgggaggtgtgcccaacagctcattgagaacgggccaggatgacaatggcggctttgtggaatagaaaggcgggaaaggtggggaaaagattgagaaatcggatggttgccgtgtctgtgtagaaagaagtagacatgggagacttttcattttgttctgcactaagaaaaattcctctgccttgggatcctgttgatctgtgaccttacccccaaccctgtgctctctgaaacatgtgctgtgtccactcagggttaaatggattaagggcggtgcaagatgtgctttgttaaacagatgcttgaaggcagcatgctcgttaagagtcatcaccaatccctaatctcaagtaatcagggacacaaacactgcggaaggccgcagggtcctctgcctaggaaaaccagagacctttgttcacttgtttatctgctgaccttccctccactattgtcccatgaccctgccaaatccccctctgtgagaaacacccaagaattatcaataaaaaaataaattaaaaaaaaaaaaaaaaatattccatgctcatggataggaagaatcaatattgttaaaatggccatactgcccaaagcaatctacacattcaacactattcctatcaaactaccaatgtcacttttcacagaattagaaaaaaactaccacaaaattcatatggaaccaaaaaagaacctaaatagccaagataatcctaagcaaaaagaacaacgacagaggtatgacattacctgacttcaaactatgctatcagactacaagaaccaaaagagcatggtacttgtacgaaaacagacacatagaccaatggaacagattagagagcccagaaataaagctgcacacctataaccatctgatctttgacaaagttgacaaaaataagcaatgggaaaaggactccctatgtaacaaatgatgttgggataactagctagccatatgcagaagaatgaaactgaaccccaacttttcaccatacataa

What is claimed is:

1. An isolated nucleic acid molecule comprising a polynucleotide having a nucleotide sequence at least 95% identical to a sequence selected from the group consisting of:
(a) a polynucleotide fragment of SEQ ID NO:X or a polynucleotide fragment of the cDNA sequence contained in Clone ID NO:Z, which is hybridizable to SEQ ID NO:X;
(b) a polynucleotide encoding a polypeptide fragment of SEQ ID NO:Y or a polypeptide fragment encoded by the cDNA sequence contained in cDNA Clone ID NO:Z, which is hybridizable to SEQ ID NO:X;
(c) a polynucleotide encoding a polypeptide fragment of a polypeptide encoded by SEQ ID NO:X or a polypeptide fragment encoded by the cDNA sequence contained in cDNA Clone ID NO:Z, which is hybridizable to SEQ ID NO:X;
(d) a polynucleotide encoding a polypeptide domain of SEQ ID NO:Y or a polypeptide domain encoded by the cDNA sequence contained in cDNA Clone ID NO:Z, which is hybridizable to SEQ ID NO:X;
(e) a polynucleotide encoding a polypeptide epitope of SEQ ID NO:Y or a polypeptide epitope encoded by the cDNA sequence contained in cDNA Clone ID NO:Z, which is hybridizable to SEQ ID NO:X;
(f) a polynucleotide encoding a polypeptide of SEQ ID NO:Y or the cDNA sequence contained in cDNA Clone ID NO:Z, which is hybridizable to SEQ ID NO:X, having biological activity;
(g) a polynucleotide which is a variant of SEQ ID NO:X;
(h) a polynucleotide which is an allelic variant of SEQ ID NO:X;
(i) a polynucleotide which encodes a species homologue of the SEQ ID NO:Y;
(j) a polynucleotide capable of hybridizing under stringent conditions to any one of the polynucleotides specified in (a)-(i), wherein said polynucleotide does not hybridize under stringent conditions to a nucleic acid molecule having a nucleotide sequence of only A residues or of only T residues.

2. The isolated nucleic acid molecule of claim 1, wherein the polynucleotide fragment comprises a nucleotide sequence encoding a protein.

3. The isolated nucleic acid molecule of claim 1, wherein the polynucleotide fragment comprises a nucleotide sequence encoding the sequence identified as SEQ ID NO:Y or the polypeptide encoded by the cDNA sequence contained in cDNA Clone ID NO:Z, which is hybridizable to SEQ ID NO:X.

4. The isolated nucleic acid molecule of claim 1, wherein the polynucleotide fragment comprises the entire nucleotide sequence of SEQ ID NO:X or the cDNA sequence contained in CDNA Clone ID NO:Z, which is hybridizable to SEQ ID NO:X.

5. The isolated nucleic acid molecule of claim 2, wherein the nucleotide sequence comprises sequential nucleotide deletions from either the C-terminus or the N-terminus.

6. The isolated nucleic acid molecule of claim 3, wherein the nucleotide sequence comprises sequential nucleotide deletions from either the C-terminus or the N-terminus.

7. A recombinant vector comprising the isolated nucleic acid molecule of claim 1.

8. A method of making a recombinant host cell comprising the isolated nucleic acid molecule of claim 1.

9. A recombinant host cell produced by the method of claim 8.

10. The recombinant host cell of claim 9 comprising vector sequences.

11. An isolated polypeptide comprising an amino acid sequence at least 90% identical to a sequence selected from the group consisting of:
(a) a polypeptide fragment of SEQ ID NO:Y or the encoded sequence contained in cDNA Clone ID NO:Z;
(b) a polypeptide fragment of SEQ ID NO:Y or the encoded sequence contained in cDNA Clone ID NO:Z, having biological activity;
(c) a polypeptide domain of SEQ ID NO:Y or the encoded sequence contained in CDNA Clone ID NO:Z;
(d) a polypeptide epitope of SEQ ID NO:Y or the encoded sequence contained in CDNA Clone ID NO:Z;
(e) a full length protein of SEQ ID NO:Y or the encoded sequence contained in CDNA Clone ID NO:Z;
(f) a variant of SEQ ID NO:Y;
(g) an allelic variant of SEQ ID NO:Y; or
(h) a species homologue of the SEQ ID NO:Y.

12. The isolated polypeptide of claim 11, wherein the full length protein comprises sequential amino acid deletions from either the C-terminus or the N-terminus.

13. An isolated antibody that binds specifically to the isolated polypeptide of claim 11.

14. A recombinant host cell that expresses the isolated polypeptide of claim 11.

15. A method of making an isolated polypeptide comprising:
(a) culturing the recombinant host cell of claim 14 under conditions such that said polypeptide is expressed; and
(b) recovering said polypeptide.

16. The polypeptide produced by claim 15.

17. A method for preventing, treating, or ameliorating a medical condition, comprising administering to a mammalian subject a therapeutically effective amount of the polynucleotide of claim 1.

18. A method of diagnosing a pathological condition or a susceptibility to a pathological condition in a subject comprising:
(a) determining the presence or absence of a mutation in the polynucleotide of claim 1; and
(b) diagnosing a pathological condition or a susceptibility to a pathological condition based on the presence or absence of said mutation.

19. A method of diagnosing a pathological condition or a susceptibility to a pathological condition in a subject comprising:
(a) determining the presence or amount of expression of the polypeptide of claim 11 in a biological sample; and
(b) diagnosing a pathological condition or a susceptibility to a pathological condition based on the presence or amount of expression of the polypeptide.

20. A method for identifying a binding partner to the polypeptide of claim 11 comprising:
(a) contacting the polypeptide of claim 11 with a binding partner; and
(b) determining whether the binding partner effects an activity of the polypeptide.

21. The gene corresponding to the cDNA sequence of SEQ ID NO:Y.

22. A method of identifying an activity in a biological assay, wherein the method comprises:
(a) expressing SEQ ID NO:X in a cell;
(b) isolating the supernatant;
(c) detecting an activity in a biological assay; and
(d) identifying the protein in the supernatant having the activity.

23. The product produced by the method of claim 20.

24. A method for preventing, treating, or ameliorating a medical condition, comprising administering to a mammalian subject a therapeutically effective amount of the polypeptide of claim 11.
